United States Patent Application Publication US 2026/0258423 A1 - sequence listing, part 48

SEQ ID NO: 301568 - DNA, 83257441 bp, Homo sapiens (residues 19,213,264-21,348,070 of 83,257,441)
  source 1..83257441: mol_type = genomic DNA
aggctacagtgttcacaccactgcactccagcctagtgtgcagactggagtgatggagtgagactctgtctcaaaaaaaaaaaaaaaaagaaagaaaagaaaagaaagatgcggttctactcagcgtcatctgattgctaccctgtaaaagtgcagccccagagttctgagcttctgatatcccaaaagaaatggaaacaggtggcccctggatgaaggaggaggtcaggggtggctggaaggcaggtcctggggagtgtaggggctggaagaagacggagggggaaggtgtggtagacactattataatagctgactgatccttgtgtaccattcccaattcccctcttccctgctgctttccactgtggaggctggaaaagagaaactacttaccttctcagcctttgttgcagctgggagtgaccatgtgacacagttttggccaatgacatctaaggagtctcattagatctcattatgtgtgtgtggcaggggtgggggtggggggtgaggggggcggggtgcctgggaaattattgacgaaagtgacaaacgctttcaattaaccctgaaagtaaccattccttttcctttctgtcttaaatgcggaggcagatgcaacgccaggagcagcatcagccacgctgtaaacaagggggaaacgccaagcgcattacagaggacgtcagccctgccatcactgggctggggaaacaatgccagccatggctggtctccgggttcacagtgataggggaaataaacccttatttgtctaagccattgtgatttgttttccttttttttttttttcagccactttacagaagagggatatttgttaaaattcagaaggagagagaaaaggagagactgcgcaggttgaaacggtggtgggaaaatgtcaaagagagagagactttgtttgcaggtggcaggggcctgagcacgattttgtcacaatagcagattgagcacaggatgtgccaggcacagcgctttatactgatcgacgcgttttaaaaatattttgtaggccgggcgcggtggttcacgcctgtaatcccagcactttgggaggctcaggcgggcggatcacgaggtcaggaaattgtgaccatcctggctaacacggtgaaaccccgtctctagcaaaaatacaaaaaattagccaggcgtggtggcacgcgcctgtagtcccagctactcgagaggatgaggcaggagaatcgcttgaactcgggagacagaggttgcagtgagctgagatcgctcacttgagatcgcgccactgcactccagcctgggcgatagagcgagactccggctaaaaaacaaacaaacaaacaacaaaaaaaaacaaatttgtagagacggggggggggggggtctcacaatgttgaccaggctagtctcgaactcctgacctcaagccgtcctcaggcccggcctcccaaagtgctaggattaaggcctgagccaccgcgcccagcagaacgcatttagttctcactgcaactttctgaggcaggctgtgctgttatccccaccacacagagggaactgcggtgctcttcttagacaagaaaagcgccagccagcgggtggtgaggcaggatttgaactcgagcacacggagcccatccagtcccgatggactgactcctccgtcagcggaggagggagcgagtcgttaggtgaacagtgagtgtctcagggtcccgagtgtgaggtggggcgtcggatgtgtcgcggggtcctgcctggccgtgtccgggccgaggcaggggaggacgatccggggcagggcagccagcactgctctccctgagggccggggctgtgcgcgctgcgcggtctgtgcgtgggatacgccgggccccgcctcgccttcccgccccgtctcccagtcctccgccctggccctgccatagggagcccggcccgggggttctgcggctgccgcagccctgacaggggccggggacgtggagggagcgggccggcgctggcgcagccgcagaactgtgcaggagagactgtgaccccggtggccctctctgagtcttggtttcttcctccgtgaaatggggcttgagcagcgcctcctcgacggggaagagggcccgcagagacagcgcgccagagagtccagggcagcgcagggaaggagcctgtggatccctcccagacccatcccaccgccgatcccgcccaggggcggcccagagcatttcctgaagggcctcaggaaataccaggcccccgcccccaaccctcccgccacccccgccgcccccgcccgtccgcccgctagcgtccagctccctggccgcccctcccccgcctccttccggccggccccctgctcgcatcttggcttgctgaggctgcgggtcttggccgggccttcgagaatcccccgccgcctccccttctggatgtatctgcgccgcctcctttctccctccccttccttccagcccttcattccctcggggcgggcgggcaggccggcaggccccgcgcaaacctggggaaaggtaggtggagggtgcggggtccgataactggcggccacacccagtaggccaggcagctgcaggaaagaggttaaaggagttggaagagattctgggaactcggggaaggaatcagggaaagctgcctggaggaggcgacatttaagtttggactggaagagcaaggcgggtcagacaataattcatgtatttaccaagcatttatcgagcacttactgtgttcaagaccctggggttggggcaggaggcaagataactgtgtccttatgggttttgcagtagggaaaacagtgaaggcaaccatctcacaaactgctggagttgagaccaccagaggggacaatagaatgttagttccatttgatcaatgagaccagagaggactggggtgaaattactttcccacagtcacaagtagtagaactgggattcgaacgtgtgctactgtaacatgagcccctaaccacaggagtctctgtggcttttcaaagcagacacgctgctgcacacaggagcagctgccagcctgccttgcagcagccatggccatgctgcagggcccacccggggcaggtgctggcagaggggacagccagccactggtgggagatcttgccctgggagaggcagcagcggaaattgctgtgggatggtggaggctgtggtggccatgatgtggttgcttcggggcccctgtggttccaaccagggcactgtgcctgccttctgtggcttcttcacccacagagaaccctcactggggccatgtcctgcttcctggagctgagattgagtctgggagcccaggtggaacccttctcactctctggggacctcccaccctttatctcctgggaggctgggctagcattcctgctttatagaagaggaaaccagggtcagagaggcatgatggctcgtccagggccacacagcagaaggcccgtgtctgctcaatgactgaagatacgcggctcttttcttgattctccattcattcgttcattcactcactcactgtaacacacgcacatatcctctgggtactcactattccattgcacagcaacctgaaggcttccagctaagcttgagcacctgaggaccagcgactctgcctgggggcttcatccagcagctgcagcctgctggcccctgccccagaaggccaccgtggtgctagagtaggctgtaaagtgctatcccccgagtagccttgatgcacaactgacctggtgagagttagtgataaacagttctgcatcatcgcccaaggttccccagctgtccatagtgttatgtgctcattcccataccctttgttggctccttcccttccctgtatcattttcctgacaacctgaaggtgattcttgggatctcattcaagccaaaaaccttgcactggaatatttttccggactgggcttctgagggtagcaaatgaagacattcatttattcagtcttcaaacacgattgacctaacctgagcccgccccatgctgggctctgggggtgtgggcatgattcataggcattttctggcctccagagccccttgcttgacggaagaggcaggaacagcttctgatgattctaacccagtgtggttaatgacgtgaccacatctccagggagaatgaccccttctgcctgggaggtcaagcggcatctccaaagatgttcccttccagcttggctttgaaggatgaggaggtgttccccatcgggaccagggggctggggaaatggcattcttggcaaagagaacagcatgtgcagaccaggagcaggagcaaggaggggctgacagatggtggcactagggacgttggcagggtcagactgtgccagccttgaaggccaggggagaccctgggactgtggcgtggtcatgggaaaccaccactgacagttttggagcaagggcaggatttggttttaggaaacgcactttctctggaaagacctacaggtttaacggtccttccttcctcattgtaactcccagcaagtcaagggagtccaccctggtgcagctgaacagcagcatcgctatacgtggagctcttattaacacttcattcactgggtcttcacacccttgagtgaagcatcctttttagtaacctctttttataagtggggaaactgaggcacggtacaggactcaatcaaggtcccatagctaggaagcgggggcattgggattagaacccatgtttcttggccaggcatggtggctcacgcctgtaatctcagcactttgggaggccgaggtgagcggatcacctgaagtcaggagttcgagactggcctggccaagatggcaaaaccctaaacatacaaaaattagccaggcgtggtggcacacgcctgtaatccaagctactcgggaggctgaggcaggagaattgcttgaacccaggaggtggaggttgcagtgagccgagatcgtgccactgcatccagcctgggcaacggagcaagactccgtcttaaaaaaaaaaaaaaaaaaaaaagactgggcacggtggctcatgcctgtaatcccagcactttgggaggccgaggtgggtggatcatgaggtcaggagatcgagaccatcctggctaacatggtgaaaccctgtctctactaaaaatacaaaaaattagctgagcttggtggcaggtgcctgtagtctcagctactcgggaggctgaggcaggagaatggcgtgaacccaggaggcagagcttgcagagagccaggatcacaccactgcactctcgggacagagtgagactctgtctcaaaacaaaacaaaaacaaaaacccaaacaacaacaacaacaacaaaagaagctgtgtttctttggctttaagcccatcctctacgttgcgccactgccatgcttttcagaggctagagggctccaggaaccaccttctttccccggcacagccctgggggtgggtgggtgggcagagaagggacaagcagcccaagtcacagccagggatggagacagcatggcttctttcggagaaatgaagaagcaggagtgttattcttggccaggatgggaaacgggttggaatcttggctcctatgctcaccagccatgtggtctgtggcaagccacatcctctctctgtgtcttgacttacccatctgtaaaatggtggctcctcataacccccacctcatagggctgttgtgaagattgaacgtactgaagactcaaattcttagtacactgccaggcacgtaggaagagctcttagagtgttattttatagccctcatttgagagggtgtgggcaggagcacagcctctgggctccaatccacaaactgccatctactagtccatttgtgagctggctggtaaattcaccttcctgggcctcagtttcttcatcagtaaaatgggataatgatggtgccttcctagttgggttgtggtgaaggttaaatgagatgccatgtggaagtgcagaggagaagggctgctataaggggctccaggtgggtgctgctgttatgattgggcacctactgcatgctgtgtccctgcatacaggagtcgacctttgagacctgcttattcatggctgtttcacggatgtcgaagtggaggctcagcagggttggaggttcccggagtctcccagctggtaagggcggtgtcaggactggaaccccagccaggctgactcagacatccctggggcctgagcccagcagggcagctgtgactcaagtttgcaggaagaggaggaggagggtggggtaaatgggtgcttgacggaagccacaacctctattccctcagaaatggaagtgcttggtgaggtttggtgtgtccgagccgaagagcagccaatgacaggcctggggatcgtctggcacagcccacttgacaaggccttggaaacttggtctctgcagcagcaaccggatttcagcctgggcctcggacacctcggcctgggtacggatgcgacttggatgcagtccttccctggcagtggaggggatgcccaggctggcacaggagtctcgggtcctctccggctctaccccaatctgctgtgtgattttgggcccaggcagggacccctctgggctctgttactggagaaaaggcaaatggctggtacgggtgggtccccagccctccttgcctggaggtctgcgagttggagggctctggggtaaagccagagccaggcccggggagagcctaggctcatctctggtgaacagggtaccctctagccaaagcaggggcaaggcgaggcacatgcccctcatatgggagctggggctgaccccctctcctagccctgcacaccttgagcacgtggccttggcccatctgccctgtgggtggacactttccagccctgggtcctgaactctaccaatcagcaggaacctagactcctgaggggtgcagcctggatgggaggtcagggaactgggttcctgagcgcatctctgtgccattcatctctccattggtttcccaaatgtggactgagcacacactgtgagtcaggcctgagctaggttctagggatgctactgtcaacaagacagatgaaggttcctgccctcatggaggggagggagacaataagcaaagaaataaatgcatgatgtaatgtcagccagggagcgatgctgcaaagcagggtgggcgtggggagtgacgcaggccggggttggggaggcatcgttgtagtggtcgggaagactgctccgagaggcagactgagggaaggaggatggacatctagatgtctgagggaagggccatttgggcagaggaaagagcacagggctcagtgtgtgtgggggggaggttggagggggctccgtgtgtaagggtgcgaatggggaagggaggcaggctgcgagtggacagggctatatgtagacttcattctaactgtgacgcaaaggccttgcagggtttgggagggggacatgatctcatttggtcttcccaataactccctgccagaaagagacagagccccaaattgcagtgaggaagctgaggcttagaggacatccctgcacatgtctggggtgtcatatcatcatcggaggagctgggactcaaacccagctctggaacctgctctgtccccagctccatgataacattgtgtgaggtgctgggtgcagctcccaactcctccctgctcaaccatgctctgttagcctgtggtctacagagtggcttcctccagggatgtcttgatgtcttgccttttttttttttttttttttgagacagggtgttgctccattgcccaggctgaagtgcagtggtgggatgataactcactgcagcctcaacttcctgggcttaacagatcctcccacctcagcctctcaagtagctgagattacaggtgcacaccaatacgcctggctaattaaaaaacaacaaacaaacaaacaaacaaacaaaaatatgttttttttgtagagatggggtctcactgggttgcccaggctggtctgaaactcttgccctcaagtgatcctcccgtctcagactctccaagtgctaggattgagccaccacgcccatctgggatgccttgtcttttatacctttactccacaaatatgtgcttaggcattgcttgctgtggccagaaccttgcaggggtgagagacacaggtaaatgagagctggtcccagccctccctcagaaagctgctggaccacagggtgacaaaactgaagctgtctgtcacatccgggagcaggtgctatgaggataagcagccagagaagacccctaacttgatctgtggccatcaaagaaggcacccaaggcaggatgcctccctgaatcctaaagccaattagcagtcagccaggacagctgctagagggggtctaagggggagtggagaggatgttccaggcagagggaacagcagacaggaaggctcagaggtgagtgtgagcaggcagtctcagggaccccagacagttggtgaggctgcagtgctcaggggaggtgtgccaacaggtaagctggcagggccgggtccctgggggctggcttgtcctttctgccattgtctgagagagtgggtggctggtatctggtggcccagatgaagataatggagatgcaattgtgttcttctttctgctcagtgcctctcagttaaggacatttgcaaaaattaataacagcatatgcttttatgtcctccacttaaatttcctttggattaaagaaagtaacggagggaaaggaagaaaagcaggaaggagcgagagagggaggggagaaagagacaaaagaaggaaaataatttggggaaaaaaaatttgtccttttctgggctaagatagccccagcctttgcattttctcacccactgagtcaccagcctcctgccctctttcaggactgtacatcttggcctcttacctactgtgtccgcgtcagcctccctcacagcctgatggcccctgcggcagccccaacccggtttcaggggctaagaaaactacagttgcatgaacgggtggaggtgagtgggaggcagaagcggcggggagaaccagtctgttccgagatctctggaccaaccagtggatcctgatggtcagccttgtctagagccccttccagcgtgcaggccagtcctcctggcattcttctaattacaccgagctgtgagttatgtgtgccaagtatgtgctggattttgtaccaagtgctttccattcatcagttcagggtagtgatgcaggtagctccaggctcagagaggaacagtgacttctcccaggtcacacagctggaaagtggctgagtctggattcaaacccagacttccttgttgctaggacctgtattttcaaccactgcctatgcctctataacgagccagcttatggctgtgttcacgcaaagagaaaagcatccaaatgggaaggctggagaattcaagcaattttcccgcgtgtcagacagtcctgtttccctctcccttcaaaaaaagtcctggattatctctctctctctctctctctttctttttccttttcctttttgttttttttctttgtttgttctttctttctttctttttttttttttttgaaacagggtattactctgttactcaggctggagtgcagtggtgtgatcacagcccactgcagccttgatgtacctgtgtccctggcctcaggtgatcctcccacctcagcctcccaagtagctgtgactatcccgagaagctgagactacaggtgtgcgcatgccatcacgcctcactaattattttactttttgtaaagacaggtttttttcgccatgttactcagactggtcttgaactcctgggcttgagtgatccatcggctcccaaagtgttgggattacaggcatgagccactgcacctggcctgacatctcagtcttgatttgcactttttgcccaaaataatcgagtgtaaggcaggccagaagtggtcagggggcagggacagtccccagcagggtggcaagtctttctgcaacatttttggaatacaagcagaaagtgatttgctattccacacaaaacatgattgggagggcactggatgaatacaactaagatctaagcattacttcaacaaatatatacacagagctaaatcagtatcaggaagtagtggagaagcactcagaataggcacagatctccacagctgttaagagtcttgttactttttttttttttttttgagatggattcttgctctgtcgcccaggctggagtgcagtggcgcgatctcagctcactgcaacctccgcctcccgggtttaagtgattctcctgcctcagcctcccaagtagtttgccttaaggagtgtagacaaaaagcaagggaagcgtccccagagagatcccggcccacagggtcagtgcctcatccccacataacataaaaacagcctgggacaggcgcccatcaccatgcctggctaatttttgtattttttagtagagacggggtttcaccaaattggccaggctggtctcgaactcctgacctggtgatccacctgcctcggcctcccaaagtgctgggattacaggcgtgagccaccgcgcccggccacattcttttttttttttttttttttttttttttgagatggagtctcgttctgtcacccaggctggagtacagtggcatgatatcagctcactgcaatctcgggctcccgggttcaagccattctcctgcctcagcctcccaagtagctgggattacaggtgcacaccaccacgcccagctaatttttgtattttttaagtagagacggggtttcaccatgttggtcagtctggactcgaactcctgaccttgtgatccgcccacctctgcctccgaaagtgctgggattacaggcgtgagccactgtgctcggtcagctgtttattgattttgagtatgttattgattttgtgaatggagaagggatcatcgggtagggttctttgatctggagcaaaagatatggattctgattaaccaaaggggaaaaaagaggggggtggatttagtggaaagaactggagtagttcagagaaccaaaggcaagccagcacggtggctcacgcctataatcccaaagacttgggaggctgaggtgggaggatcgcttgagcccaggagtttgaggctgcagtgagccatgatcacgccgctgcactccagcctgggtaacagaacaagactgtctcaaaacaaataaacaaaacaaaacaaaggccaggcttggacaggccaccacccaaggtagctgcaggatctcagaaatgagaattaacaggcaagttttttgtttgtttgtttgtttgtttgtttttgagacggagtctcgctctatcgcccaggctggagtgcagtggcgcgatcttggctcactgcaaactccgcctcccgggttcatgccattctcctgccttagcctcctgagtagctgggactacaggcgcccgccaccacacccggctgattttttgtatttttatagagacggggtttcactgtgttagccaggatggtctcgatctgacctcgtgatccacctgcctcggcctcccaaagttctgggattacaggcgtgagccaccgcgcccggcctgtttgttttttgaggtggattctcgctctgtcacccaggctggagtacagtggcgtcatctcggtgcactgcaacctctgcctcccacgttcaagggattctcctgcctcagcctcccaagtagctgggactacaggcgtgtaccaccatgccccgctaatttttgtatttttagtagagacagggtttcaccatgttggccaggctagtcttgaactcctgatctcatgtgatccgcctgcctcggcctcccaaagtgctgggattacaggcatgagctactgtgcccgaccagcaggcaagtttttgaaggcaacactgctgtgggtggtccacagggtggacagatgctgggcagttaattcaacagaggacctctccaggtggctagggtgttggctgacagcatgcaaatccccagagctctcacctgcagctggcatgtgaaaccccactgaacatgaagcagttttgttctgtaaatcctacctttggatctgagaaccaaatataggttgagatacctggcctaccagtaacctttagtctagactatggaatttcccttctagaaacttaccctgcagttaaatttgcgcaagaacatgtatgagaaacagaatgcagggtataatgtacgtcatctgctggggactggttaaatataggaaggctttaagaatgaggttgggtacaggggctcacgcctgtaatcccagcactttgggagaccgaggtgggtggatcacctgaggtcagaagttcgagaccagcctggccaatgtggcgaaaccccatctctactaaaaatacaaaaatcaggggccgggagtggtggctcacgcctgtaatcccagcactttgggaggccaaggtgggtggatcacttgaggtcaggagtttgagaccagcctggccaacacggtgaaaccccatctccactaaaaatacaaaaaagtagctgggcatggcggcacatgcctgtaatcccagctactcgggaggctgaggcaggagaatcgctgaacctgggaggtagaggttgcagtgagccaagatcacaccactgcactccagcctaggcaacagagtgagactccgtctgagaaaaaaaaaaatttgggccgggtgcagtgggtcacctgaggtcaggagttcaagaccagcctggtcaacatggtgaaaccgcatctctcctaaaaatacaaacgttatctgggcatggtggtgcatgcctgtagtcccagctactcgggaggctgaggcaggacaatcatttgaacctggaacaccgaggttgcagtgagctgagattgtgccactgcactccagcctgggcaacagagcaagactctgactcaaaaaaaaaaaaaaaaaaagagcctgggcgtggtggctgacgcctgtaatcctagcactttgggaggccgaggcgggtggatcacctgaggtcaagagttcaagaccagcctggccaatatggtgaaacccagtctctactaaaaatacaaaagaattagctgggcatggtggtgcatgcctgtaatgccagctgctcgggagcctgaggcaggagaattgcttgaacctgggaggcgtaggttgcagtgagccgagatcgtgccactgcactccagcctgagcgacagagactccgtctcaaaacaaacaaacaaacaaacagaataaggcagttctcttttggtgggtgtgcaacaatctccaagagttacactgttaatgatataagcatgaggtagtgtgtggagggagttactgtttccatgcgtgggggtgaaggaaatacatacaataagattatgtcagaatctctgttacactgtaacagtgattgccattagggaggggacctgcagatcaggagaaacagtaggagggagacttgttgcatatgtccttatgcactgattgaactttttttctgtgcatgtattttttttttttttctttttcttcgagatggagtattgctctgtcacccaggctggagtgcagtgatgcgatgtcagctcactgcaaactccgcctcctgggttcaagcaattctcctgccttagcctcctgagtagctgagattacaggcatgtgccaccacgtctggctaatttttgtacttttttttttttttttgtagagatggggtttccctatgttgcccaggctggtcaaatgctactcttttgagcagacttctttgtattacagtttggagtggttatgttttaactctcaagccaagctgaaagttttaagtgtgtgaaacttgtctgtaaattttctgaagaagcaagcaccgtgcccttctgaggcaggtgaggagctacggctttctcagaacacactaagagtctcttgtagaaaggtgctatgcacatttccaaagaaggggcgctctgagagaggacagcagagaatagtggatagatgttggtccctggctctgactgacatgtgaaaatctcagcctatcagctgggccaccagctattgcccctctctgcacctcagtttactttgctcatctgttaaacagtgataagtgtgcctgtcctaccctgttgcaacgatctgtcaagaaaacaagccaagaccgggtgccgtggctcatgcctgtaatcttagcactttgggaggctgagtcaggcagatcacttgaggccaggagttcaagaccagcctggccaacatggtaaaactgtgtctctactaaaaatacaaaagttagccgggcatggtggcctgcacctgtaattccagctactctggaggctgaggcaggagaatcacttgaacctgggaggtggaggttgcagtgagccgagatctcaccactgcactccagcctgggtgacagaaaacaaaaaagacctgaagccaaggttgtgtctgtttactaaaacaatgcacgtgaaatgttttgtccaggtagttaccatttctttttctttgggtgggaggggggtgttgtttgctttttgtggttgtgtttttgtgttttgtttgtttgatttgtttttgagacaaggtctcgctactggacccaagcgattctcccacctcagtctcccaaagtgctgggattacaggtgtgaaccaccaggctcagcttatgataactgtttcaagtcagaatttgacaatctgaagaaaactttttttttttttttgagacggagtcttgctctgttgtccaggctggagtgcagtggcgtgatcttggcttactgcaacctctgcctcccgggttcatgggattctcctgcctcagcctcccgagtagctgggattacaggtgtgcaccaccacgcctggctaatttttgtatttttagtagagacggggtttccccatgttggccaggctggtctcaaactcctgacctcaagtgatccacccacctcggtcggcctcccaaagtgctgggattgggattacaggcatgagccactgtgcccagccaaaaacattttttttttcttttgagaaagagtctcaccctgtcacccaggctagagtgcaatggtgtgatctcagctcactgcaacttctgcctcccaggttcaagtgattctcttgcttcagcctcccgagtagctgggattacaggcatgcaccaccacgcccaggtaattttttgcgtctttagtagagacaggttttcataatgttggccaggctggtctcgaactcctgaccttgtgatccagccacctcggcctcccaaagtgctgggattataggcgtaagccacggtgaccagcctgaaaacgttttctaaatggcccattttgtttggaatcttcaccactttgggaaaaagcctaaagattaatggaacagaaatgtgccataagatcagagactagatattgagtggatgctatcttttttttttttttttttttttttttttgagacggagtcttgctctgttgcccaggctggagtgcagtggcacgatctcagctcactgcaacctctgcctcccaggttcaagcaattctctgcctcagcctcctgagtagctgggattacaggtgcccgccaccacgcccggctaattttttggtatttttagtagagacggggtttcaccatcttggccaggatggtctcaaactcctgaccttgtgatccaccctcctcggcctcccaaagtgctgggattataggcgtgagccaccgcgcccagccacggatgctatttttatagttacacattatgctctagggaggaaaaatgatgaaggtcattgaaatttgcttatgaaatataattaaagctctggaagaaagatattatgtaaatcccaagcagaatgatcagtttattaattgatttaatgaagactgaaagtatgaaagtttggaactatcaaaaaagctaaatggaaaccatttcaaaatggggttacttaatcccagcactctgggaggccgaggcaggagaataacctgaggtcaggagtttgagaccagcctgaccaacatggtgaaaccccgtctctactaaaaatacaaaattagccgggggcggtaacgcgtgcccgtaatcccagccacttaggaggctgaagcaggagaatcgcttgaactccggaggccgaggttgcagtgagccaagatcgagccactgcattccagcctgggcaacaagagcgaaactcggtctcaaaaaacaaaacaaaacaaacaaaaaaacccacaaaaaacagaaaatggggttactatcaggaatctggatactgactaatgaaaatgcaagtgggctgggcgcggtggctcacgcctgtaatcccagcactttgggaagccgagccgggcggatcacgaggtcaggagatcgagaccatcctggctaacacggtgaaaccccgtctctactaaaaatataaaaaatgagccgggtgtggtggcgggcacctgtagtcccagctactcgggaggctaaggcaggagtatggcgtgaacccgggagacggagcttgcagtgagctgagatcacgccactgcacttcagcctggtctacagagcaagactccgtctcaaaaaaaaaaaaaaaaaaaaagaaagaaaatgctagtggtctggctgaagaaggagaagagggaattcattagtgtggtgggcactcctggtcagcatttgttcttgtcgcaactccgggaatgagccctgatttgactacgccaattatcataattccccatttcaccctcccatgatccaagttcttccattcagagcaagcctaggattttagtttgctgaattgagagaaagagatgctctctcttccttccttccttcctcctttcctgtcttcctttctctctttctctctctttctctctttctttttctctctttctctttctctctctctctctttctttctctctctttctcttttctttctgtctcgctctgtcatccaggctggagtgcagtggcatgatctcggctcactgcaaccttcgcctcccgggttcaagcgattcttctgcctcagtctgccaagtagttgagactacaggcgcgcatcactatgcccagctaatttttgtatttttagtagagatggggtttcaccatattggccaggctggtctcgaactcctgaccttgtgatctgcccatctcggcttcccaaagtgctgggattacaggtgtgaaccactgcacccagactgctctctgttttccatggcatggccagagatctgaggcatggatgtgccacagccaatctgcagctagtcaagacaccagccaaggaaaatggccacatgtccaagaggcatatgctaaagaatggagccagagccttgatcgcactgcacttgaaccctagctctggaaattttggttaaatgagccaattgattccaattatcatttaagccagtttcagtggggtttttctcttcctttctttctttctttcttttttttttttttttttgggtagggtcttgctctgttgtccaggctggaatacagtggcacaatcatggctcattgcaacctcaacctgctaggcttaagggatcctcccgcctcagcctcccaagtagctgggactacaggtgagcaccaccacgtccaactaagtaaaaaaaaaattttttttttaagagacaacgtcccactatgttgcccaggctggcctcctactcctaaactcaagtgatcctcccgtgtggagcaccaaaactgctaggattataggtgtgagccacctcagctggcctgggttgggttttctttttctgtttttttttttttttttttttgagaaggagtctcactctgttgccaggctggagtgcagtggtgcaatctgggctcactacaacctctgactccctggttcaagcaattctcctgcctcagcatcctgagtagctgggattataggcacgtaccaacatgcccaattaatttttcatatttttagtagagacagggtttcaccattttggtcaggatggtcttgatctcctgacctcctgattcacccgccttggtctctcaaagtgctgggattacaggcgtgagccactgtgcctggcctgagttgggttttctatcacaatagttccaaaaaatgtattggcttgtgtgctgaaaagtctatgcttaaagcttcaggcatggctggctggctggttcaaggtgcttaatatcagcaggactctatcttttctctcatctctgttcccatctgtgttggcttcattcttaggctggttctccattatggagctactccaggcttatatcccactagctcagtaacctgataggaagagaagcttctttttttcttttttttgagacggagtttcactcttgttgcccaggctggagtgcaatggcacaatcttggctcactgcaacctctgcctcctgggtttgagcgattctcctgcttcagcctcccaaccaagtagctgggattacatgtaccaccacgcctggctaactttttttttttgagatgaagttttgctcctgttcctcaggctggagtgcagtggcatgatctcggctcactgcagcctccgcctcccaggttcaagcgattctcctgtctaagcctcctgaatagctgggattacaggtgcacgccaccacacccagctaattttgtatttttagtaaagacggggtttcaccatattggccaggctggtctcaaactcctaacctcaggtgatctgcccgcctcagcctcccaaagtgctgggattacaggcatgaaccactgcaccccggcccctagaagcttcttttttcaatgatttctgtagaagtcccaggcttggcttgagagtcattgctctgctatgagtcaggtgcccattcctgaactaatcactgaccagggagagaaagctctgattgactcaggctcagagctggaagggagaaggagtcgctcccttcagcctattcagattcttcccaagagtttagttttaggcatggtggctcatccctgtaatctcagcactttgagtgggtggctgaggcagggggatcaactccaggagtttgagaccagcctgggcaacattatgtgatcctgtctctacaaaaaaattggaaaaaatagccaggtgtggtgtagtcccagctacttgggaggctgaggtaggaggattgtttgagcctaggagattgaggatgcagtgaaccatgattgtgccactgcactctagcctgggtgacagaacaagacccggtctctctctcacacacatacacacacacacacacacacaaaaggctgggcatggtggctcactcctgtaatcccagcactttgggaggccaaggtggacagatcacctgagttcaggtgttcaggaccagcctggccaacatggtgaaaccccgtctctaaaaaaatagaagggccgggtgcagtggctcatgcctgtaatcccatcactttgggaggccaaggcaggcggatcatctgaggtcaggagttggagaccaggctgaccaacatggtgaaaccacgtgtctactaaaaaaataccaaaattagctgggcatggtggcacatgcctgtaatcccatcactttgggaggccaaggcaggcggatcatttgaggtcaggagttcgagaccaggctgaccaacatggtgaaacggcgtgtctactaaaaaaataccaaaattagctgggcatggtggcacatgcctgtaatcccagctactcaggagaatcgcttgaaccagggaggcggagggtgcaatgagccgagattgcgccactggactctagcctgggcaacagagtgagactccatcttaaataaataaataaataaataaatttagaaatacaaaaattagccaggtgtggtggcacatgtctgtaattccagctacttgggaggctaaggtaggaaaattgcttgaacctgggaggcggaggttgcggtgaactccgcgccactgcactccagcctgggcaacaagaacgaaacttcgtctcaaaaaacaaagaaaaaaagtttagctttggagtttaggcttgggttttccagggttaccactttttagctgtgttatcttgggcaaataatggaagctttctgaacctcagctgtaaaataaggataacggtagtctctacctcttagggttttttatgaagaggaaatgaggtactgcatgcaaaacatttgcacaatgctcactactttgttgtcattgttactagttcctttctccagcacctgcacttccaggatgttggcacaggtccttccttccccatgggctagaaggaaacttcctcctgtgagagctgtcatagctctttctcttgattgtctatgtggcatttggtttctgctcatgttcatgctgcccaaactcaaaacttctctgtcctagactttcaacccctagaagggaaaggatggctccattcttttcaatgtccttaataagagaactgccatcaacacccatccagtgcatttacagtttccaaagcatttcctcctctgccttttcacctgagccagaatgcaatcctagggagtgggaggggttattattcccacttcacagatggggaaactgaggtccagggaggggcagtgacgtcatggtcaagcagcaagtcggtggacaagaaattaggtgtttctggattgccaacacaagtttctttttgtgggacaaatagttttgaatatagagttcaagcctttggtgaagatcccggggagcctgttctgcacctgtgctaagtgattcttttcattcagcatgcagtctgtccctgtctgctgcctgccagtctttcccccaaagtcccttcctgcttgaaaccctccttccctaaccccagagacacccctggcctgcactgccagctctttcttctgaaatacacctctccaaccggcccccatcagtctgctccattatccacctggaaccaacctccaaacctctgcaagggcagatgagagtgtctcctccagccctgttttccatggactgctttgggcacggatgaaattgttcagcttatcctgcaagttcctctgcaagactgcttatgtgctctagactcatagaacctggaattgaatcctagccctgccacatgctgcctcagtttccgcatctaaaataggaatagggctgctgacgtcaagggatcatcatgaggatgaattgagagaggaatgccagggggctgatacgcttcaaggagggggtccaggaaagagaaatgactttgaggaatgcaagaatgtcccctctgaccttgcacgtggcggtcttccggcctcaggacaccctcctccacttcccaagcctgggctaatctggtattctccaactcacttcctgtcctgtaggttagctcatcatctcattatctgtatccagttctctttccaggcttgcatattatctgtgcggctacacacacttgctaggtgggtagtgaagggagtattaggctctgcatatggaaaagtgggcctgggtggccaagccccagcatatctccaaacctcaatttcttgtctgtaaaatgtgaacagcaagaatgtgcaccttgctgggcacggtggctcacacctgtaatcccaacactttgggaggctgaggcgggaggatcacgaggtcaggagttcgagaccagcctggccaacatggtgaaaccctgtctctactaaaaatacaaaaattagccaggtgtgggggtgcgggcctgtaatcccagccacgtgggaggctgaggcaggagaatcacttgaacctgggagatggaggttgcagtgagctgagattgtgccattgcatttcagcctgggcaatagagtgagactccgtctcaaaacaaataaataaaaaaagaatgtgcacttgtggaattgtggtaaggttttagaccagcactggtcagcatggtagcatctagccacatatggctatttacatttaaattaataaaagtttaatgaagtttaaaaaattcagcccctcagtctcactagccacatttcaagtgctcgctggcctcctgtgactcgtagctatcctacggacagcacgcagaaagaacatttccatcgtggagggaaattctgctgaacagtgctgatttagaagcatcacgcccgtgctgtgcatcagctctgtgttataactcatctgacattgtaaactcagggcagaagcatgattgcagtgtaaagttctgctttccttggagatggggtaaagaggtgaggctcacaaggaatgttggactggttgagggcattctctgggatgagggtggaccaagttcaaaacggggagctccggcttctgctgcaaggcaggcacatagggcataattccctctgctggtggagaaggggcaccaagcagtgggaagggtggttaactggagagtgtttctagcatctagagctaccagtgtttgacttttcaaaggaaaagtggctatgtggttttgcaaacgtgttacaagctctctccatttttatcgtatttattgtatcactagctagactaataaagaaaaaagagaagatacaagtaaacataatcagaaagggcaaagaggacattaccaccgaccccatacaaacacaaaaaagccctcaaaaactattatgaacacgtctatgcacacacactaaaaaacttacaataaatagatgaattcctggaaagatacaaccttttttttttttgccagagaatggaattccagatcctgggttgttagaaccttaagggatactttcatcccctggttcctgtacagggaggaggaatctgaggctcagagaagtacagtgacttgtttaaggtccctcagtgagttagggcagaggaagacttctggccacagcttccctgaagccaaggctaggcagagtgttgatgtcacccaggcaacagggatggtgccctctgcccacctagcaagccctgactcatgctccgcgcccctgctgtgagaagtctctgctgactcccaccctgattggagcaggttagtcagctttgaggtgcagcctccagttctggcccctccagttccgggactctcattcgaggcatttggggctgtctcatttctgtgcccagcacagggcttggcacagaggaggtgctttgtgggtgcccgccagtcaagggtttccgttttcgtgccatgtaggtaaccccttgccattcgtgcccttaggtaaccccttgagcagcctaaagaagcctagagacttctccgtttttgagtatattttattgacgtgaaatacacgcacggaaaagcgcacaaatccaaagtgtacttccgcgcatcttcataaagtgaacacacttgtagcctaagaacccaaccctaccagcgcccggcaggccctggcccccttccagtctctcctactgaacaaggtttttgagtgaaaccggcaggccggagcgtgagtttctgcttgacggggcggggtctgcgcgtgctgcccggccgtgagtgtgggggggccgtgagtgtgtacggggtggagtggcctgaaggggattagagtgcgcgcgttcgggtattaatttgccagggtttgtgtggcgctcgggattgggggttttttgggggctcgggcgtcgactgtggggcgctgcggaagggtgggtcgtccgcgtggggtcctggagcgcaggaggcggaggggaagccgcgcaggggccactagggaggggctctggcggggtcgcaggggcgtggtctgcgggcgtgggggcgggacctcggggcctcgggggcggggcctgagggcgcgcgcacgcgtccggcgcgccccctcccggccgccatgttggctggtgtgtgggtgtcaaactgagccagacgcggcggtggcggcggctccgcgggctacggtcgctcccgcctctcgagcgctgccggtggccgcagcggcgcacccacgccggcccggaggagcagaggtgagccacagcccgtggggctccaaggccagagcgagtccccggggcgaggaccctccccctctccagggcgcggacgcccccagagcacaggctcccctacctcaccagccccgccagggcatgcgcccctgccgccccgctggtccctacgccaggctctgggggatccccttctttccaaccaggccccgccccacggactggagcatggcccccttcccatctggatccagctttccgctgcaaggatctccccccttacccgtccctatcaccgagcatctccttttatgtccccagagtccagggcgccccttactcctacctcggatcctggagccccgttcatcttggaacaaccccgccccctccccagagcacgttcctcctctccccgagcccggcgccccttcctcctgagcccagcctggtctcccgccagcccccgtgcagagcccggtccgggcgccctccgggaatcgggggaggggtccttatctctgtccgggatcccgcccgtctcacctttcctgggggctgtagcagggcccccttccgtccttggggaccaggctccccactccccagcccccactcccacggaacagcggggacgggggcggaagagccaggctccagctgccttttgttccgcgtgggatggcagagacccacccggcccggcggtcctgctcggctgatccgggtgggtgaatgggtgcgtggggtctggcctcttccaggagagacttcctctctctccctgtggggcggctcccctagagccgagagccgagcgcgttgggaggctggcctttgctagaggagtcggtgccaacaggtttttgtttgcgacctgaagtttgcccagtggctttccctggggcagcttgagctccctgtgaatccccccgccggagcttgtggaaggccgtttctccgcccaaggagtccgtctgggcgactccttcacagttgtgcttccctggggacgtatctaaaatctgtgctttaagagcggagagggcttaaccatcattagggttcagatgagggaaactgaggcccagaactgcagtaatttgcccaaggtcacgcagtgatactgtgtcagtgcagaactagaagctaggtctccaggctctgtttaccacatttaataacttttttatcttttagggagatgttcaggaccctaccttcccctttatttttaatatttatgcaagaaagtgggcaggaaaatatgagaagtaatgagttattccttttcacctccagaaaatatcctgtgaaagaagggattggaacagggtgttaaaatgatgggaaaaggtgaattttaagaatccaagcttcctctcattatgtaatataacgaagatttggcagaaaacgtgcctcttgtagctctagatacagaattttaggtgctgacaaaatcttatgctgaatctggcacagcagtgattgagttagcattgataattaagttttcatctgtatttaaatgaacatcaaaagggactacaatttgcttctgaatggtacttgttcggtgcttgtttttgggacaagtgattgtgttggggaagcgcacctaaacttttaaattttttatttatttatttttttgagacggagtctctgtcacccaggctagagtgcagtggcacgatctcggctcaccgaaacctccgcctcctgggttcaagcgattctcctgcctcagcctccggagtagctgggattacaggcgcacgccatccaccacgcccggctaatctttgtatttttagtagagacgggatttcgccacgttggccaggctggtctcgaactcctgacctcatgtgatccgcccacctcggcctcccaaagtgctgggattacaggcgtgagccaacactcccggcctaaatcttttatttatctgtatttttacttttacattttaaaagcttatttatttccctggttttaaaattgggctagtcatctttaccagtctcactgggctattcttttgtaagcagggaatgagatactggttattaaagattttggtaaagtgtaagttactgtaaggcatgattcaggactgcgtcccacaagtccccggaccaggagccagttcggattgtcttgtgggatgtaccaagtttccctggtttacagaggctttttgcctctctgaagcctgagctggccagatggagagctctgtggaaaacttccagcagtgtgtgttgggccaagcactcgaggtgtgaagaaatgtaaaactttcaagtgataatatctagcatcgtgtatgcagccttgaaaaatgacccaacctttgtagaaattctctgttatcactaaccctcttccataatgagcggaggatttcccaagaattgggattctgataagagtcctgcaaaagttgaaaagttttcggactttttttttttttaactttaattaggaggagcggcaactttcggttgtgaactgaagtactatgagatttttatgcatggaattgtccttgtcatacttttggaaagtacattaaaattttctaagttttctggcggttctcactgttccccataacctttctctctggtgtataggggtgtgaaggaccacgattgttgtcattttatgacatgtatacctggtgaccctgagccttggagaagtcaaagggcttggatttggggaatttttttttttttgagatggcgtctcacgctgtcacccaggctggagtgcagtggcgcaatcttggctcactgcaaacctctgcctcctgggttcaagtgattctcctgcctaacctcccgagtagctgggactacaggcgtgtgccaccatgcccggctaatttttgtatttttagtagagatagggttttgccatgctggccaggctgatctcgaactcctgacttcaagtgatccacctatcttggcctcccaaagtgctgggattacaggtgtgagccaccatggccggccttggattcggggaagttgaggctggaaaagatgtgaggaattacgtagtttgtatcccttttttgtctgctggacttttaactcatgtattcggtgtaaacagacctcttctgtcaatactttgccgtctagctcgtccgatgtttggcccctttttctctgctatcctaccttcaccaacccacacagtctgctggtgcacttacgacattgtccgtgtatctggggctcttgtgacactgtgacgtctttgaggccagtggtcagcttgtctttacttctccagtaccaggctcggtctctgatagatggtagatgctcagtaaaggtttgtcaccagtattcctcgaggcaggggagcacatttttatggctccctactgttctgtcgcactgttgctgaaatcactactgttggttcagcaattgtgtgtcagttgcataggtttatccacctcatctgcaggtgaggaaactgaggcctagggagcttaagttacatgctcgaggtcgcgcagccagtaagtgatttgaacagatctgttggactccaaaatgttattatacctgttacctacttcgaggaccaagtctcatggggatgaagagacacactgcaagttaacagtggactgagggaggtggggtgatatgattaaggtggttgaggatgggaagagcacatttgttttttgtcagatgcattgtgaaatgaatgtttatgtccatctgttgagtttttgaaaattgacaaacttgccgggcatggtggctcacgcctgtaattccagcactttgggaggccaaagcggccggatcaccctgaggtcaagggatcgagaccattctggccaacatggtgaaaccccatctctactaaaaatacaaaaattagctgggcgtggtggtgcacacctgtagtcccagctactcgggaggctgaggcaggagaatcacttgaacctgggaggcagaggttgcagtgagccgagatcgcaccactgtgctccagcttggcgacagagcaagactctgtctcaaaaaaaaaaaaaaaaaaaaaattgacaaactttctgataagttcgtcaatggaattttattgcttaactagttcattcaagttaactaaaaatagaaacttagaaaaacaaatacagtgaaataagtatatgttgaaagccgtttcagcagcctttttttaaaccactgtaatttccatcaacatttaacatagggattatcacccatttgtgagtagaaaaactgaggcccagagaggttaagtaagctgtgaggaactggcacagccaggattcaaagtgaatctgtgtaattcccaggcctgggtcccttctgctccactggcccctgtagaaggccccacaaaataataggtattcatttaaataatagaataaatttgttgtctgaaagtcaccaccaagtttatttagaaggttgggaattgtgaataacgagatttctggctctttcctaaccttagaacctttgaaaacactgtggtttgaatgtcaataattaatggatcattttagctgagagacactagatttggtgtttgatctgaaaaaaaaaaaaaaaaagcctaggccagccacggtggctcatgcctgtaatcccagcattttgggaggctgaggtgggcggatcacttgaggcctagagtttttgagacgagtctggccagtatggcaaaaccctgtcttgaccaaaaaaatacaaaaattagccgggcatagtggcatacacctgtagtcccagctactcaggaggctgaggcaggaaaatcacttgaacctgggaaggggaggttgcagtgagtctccagcctgggtgacagagcaagactcttgtctcaaaaaacaaaaacaaaaaacctgtcttcttttgaaccagatccgcaacattgttaaaatgctccctatccatgcattggattctttctgtgactcattcccctagtacctaggtgctggagcctgcttcgttcctgggcatagaaagtccttttcctgattctgtttcctgttggtcctggtctaggcagagtgtgcttcactttcaagccctctagagacaggacaggtaacttaattctctttctgttcaaagcaatacaaggaattggacatgcaaagggctgtaaataaagggactccccatcttctcttcatggtaaccctgctgatatatagaacagggaaaagtaggctcatcctgggggacggctgattgtttagggctaatgcatgatgtggatttaaaagcatttataattaatcacttctgagtgcaggcttcatttttcctcttggtcccacccctcttaggtagttgcacgttgcagcagctcgatagctgagaacaccaagtggtacagttaatttggcttcaaaggccatgtggcagatagctttggaatgaggtgtgggtactaatgggcctcctggctgggtggctttgggcactttaatcactgagctttggtgtcctcatctctaaaggggggctcgtaatcactacttcatgaaatagactagccttgtttctcaaactcctgtgtgcagcagaagcacccagagggcttgctgaacacgtggctggggctgcaccccattgtttctcattagggaggggaggcctgagaatgtgtctttttttttttttttttgagacagagtcttgttctgttgcccaggctggagtgcggtggcgcgatcttggttcgctgcactccacctcccaggttaaagcgatttttctgcctcagcttcctgagtagctgggattacaggtgtgtgctaccatgcctggctaattttttttttttttttttttttttttttgagacggagtctcgctgtctcccagcctggagtgcagcggcgcgatctcagctcactgcaagctccgcctcccgggttcacgccattctcctgcctcagcctcccgagtagctgggactacaggcacccgccaccacacccggctaatttttttgtatttttaatagagatggggtttcaccgtgttagccaggatggtctcgatctcctgaccttgtgatccgcctgcctcggcctcccaaactgctgggattacaggcatgagccactgcgcccggccatgcccggctaattttttgtatttttagtagagatggggttttaccacgttggccagactggtctcaaactcctgacctcaagtgatccgcttgtcttggcctcccaaagtgctgggattacaggtatgagccactgtgcctggcagagaatgtgtatttttagccagcttccaagtgctgctgatgctgccagtctagggaccaaatttgggaaccttggcccagaggactttatgggaaggtgtgtaagatgtctagcacctgctggctgtgcagtaggaactcaaaaatgacactgaaatgtttctgaatattggtctgaagatgatggatggcgtgacatttggaaaggaaatggggagagaagatgtcattgtccttcaaaaaggctgtaaatcttggatgctgttgaaaaagcaggttcatcattctcacacatcatgtaagaagtttactgtctaggccttttagaattgtaacttgggggctgggtgcagtggctcatgcttgtaatcccagcactgggaggctgaggctggtggatcacttgaggccaggagttggagaccagcatggccaacatggcgaaaccccatttctactaaaaatacaaaaatgagccaggtgtggtggcgtgggcctgtagtcccaactactcgagaggctgaggcacgagaattgcttgaacctgggaggcggaggttgcagtgagccgagattgtgccactacactccagactgtgtgagggagtgtgactcttctcaaaaaaaaaaaaaaaagaaagaattgtaacttgaaaaggttgagggagtaatgttgttgggtcctggattcccacggggccacttggcatggaccactggtgttaatggaagttgcttctcctccctgcagcaattcagatttaatattctttcatgtttacagttcgaattttttttcttcagtggtaattatcaacttgtccatcaaaaccgaatgtgcagggaggtgtgtgtgagccccgatggtttttgaatatttcctgtgtgcgaggccttatattactaattttatgcactgtgtttaattttcatggtggtcctgcaagccctatcaccatttctcattttgcattttaaaaaactaagaggggttcagtaacctgccccaggccatacagttagtatgaactcctgctggtatgccccagctggtatttgctgccacctgtgtcaaactcagaactgctttatttccacgacctcatttgcagctgtgccaggtgcgcccattacctcactgtaccctcacaacaaccccaagaggtaggctgagcaagctgaggctcggaagaggcaagcttggtcatgggcacctggccagtggctggctggacctgaattcagtcccacacctgtctgattttggagctttatgaagttgtttctatgataacagcttacctctctgtcaggtggccctaagctgcctggatgtgtacagcagggacctagggctaccctagatggcttgaccccaaggaagtctgtgtgggctagtaagggtttttgtgtttgcagagctgtgttaaaataattggccaaatttttccttgagcgaaggggacatttctttttactttgtgatcctgcagctctgcacactggtgtgggtactaaggactgaaaaccctctactaatgctactttgttaaaagggggtcaaatatggaatttggtagtcttttttttttttttttgagttggagtctctgttgccaggctggagtgcagtggcgggatctcagctcactgcagcggcgggatctcagctcactgcagcctctgcctcccaggttcaagcaatcctcctgcctcagcctcccgagtagctgggactataggcatgtgccaccacacccagctaatttttatatttttagtagagatggggttttgccatgttagccaggatggtcttgatctcttttttttttttttttaaagatggagttttgctcttgtcgcctaagctggagtgcaatggcgcgatctcggctcactgcaacctccatctcctgggctcaagtgattctcctgtctcagcctcctgagtagctgggactacaggcacgtaccaccacgcctgggtaatttttttgtatttttagtagagaccaggttttaccatgttggccaggctggtctcgaactcctgacctcaggtgatctgcccgcctcggcctctcaaagtgctgggattacaggcgtgagccaccatgcccggcccttcttcatctcttgaccttgtgatcctcctacctcgggctccccaagtgctgggattacaggcgtgagctatcgcacccagctggaatttggtagtcttaaaaagttacatgtggctgggcgtggtggctcatacctgtaatcccagcactttgggaagccgaggcaggtgaatcatgaggtcaagagatcaagaccatcctggccaaatggtgaaaccccatctctactaaaaatacaaaaattagctgggcgtggtggcgcatgcctgtagtcccagctacttggaaggctgaggcaggaggatcgcttgaactgggagacagaggtcgcagtgagctgagatcatgccactgcactccagcctggcgacagagcgagactgtctcaaaataataagaataataataattccatgtgaagtatgtccttccccagtaggcaattaacacctgggttctagccaatgggtaattttctctctggtcttaaaatgtcctggggaggctggggtgtgagcattttcccaaggtttgagcactctttgcagctccccaaccaaggaatggtaaacagctatgtgttggtgcttgccctgcacttgtgggaggccctggaggcttggacttgagtttgttttgtgaactctttaagactctgaggtgaataaatcaatgtgagcaaaaagttgtattaaaaggccccttccgccccccccaaaaaaatatcctagcaataaagggacgcagttgttttgttttgttttttttttcccccctgaaagcaagtcctccctgtgtgcctttttttttttttttttttgaagcggagtctcgctctgtcacccaggctggagtgcagtggcgcgatctcagctcactgcaggctccgcccccgggttcacgccattctcctgtctcagcctcccaagtagctgggactacaggcgcccgccaccacgcctggctgatttctttttgtatttatggtagagagggggtttcaccgtgttagccaggatggtcttgatctcctgacctcgtgatctgcccacctcagcttcccaaagtactgggattacaggcgtgagccactgcgcccagccccctgtgtgcctttttgatactcagagctgtcctgggatataatgactatactatggatgacaaaatttgggaaacatctgattggagaaagaatttgtatgtcactttatgagaagcagctgggagatgtagaagtatgggcatttcaaggacagtttcatgactgaggccagtgtcaacctgaaaaatatggaacacgtgatctagaggcaaataatggttataaatgaaatgccaccaagaacttaatctaattgagaagacaaagttactatttgtgagacagaagctagcagtttgttgagccatgattttgattctttgtcagggggtcaagaatggagaaaaaatttagaagtcagggaagctatcaggagaaggtaggatttgagctggaccttgaagaacaagaaacagtatccctaagtggaaggcagatgggaaggtatttcggatctcaggaacagcaggagttaaagcttgagatgggatggggtaggtgcttgagtgtgtgctggctcctgcagctggtgacgggtggatgcctgctgggagcagtgagctcccaggtggccagatggccactggctctgatgagacagcagccttggggtttggttttctgggtagtagggagcagggtaggtcttgagtgggtgccacctcaagtgtttgagaagggggccctgcggagtaatctctgtgggtgggggcctggcccagactggcttcctgagactggctagatagcagttctagagatggagaatgaagagaagccagagttgagttgtgtttagggagtaaagggggcctcagtgctggctgggaagtttggatttgactccctgggagcctgcaaatcatgtggcctggaaagctagaaaaatgcccatgatggggccctaccccagaccaatcaagggggagccagtaatttttagaagtgcccccagttaattctcatagtctgtgtgggttgagaagctgagctgtgtgcttggaggagcctctgggagtgtcagggattggaaggggaaaattgaagccagaagaagcctttgaagtaatgtggtgcggggactgggttcctgagctattgtagaatgactgtggattggctggtggaatcagggctggagaggaactggcagaaatgatcaccctggctgaaatacgcctctaagctaccttggtaaataaagaaggacagcttagtagaaagtttaaacaagggatgggcagaagagactgtgatccacctatttggcaagcctcctttcaacctgcattttagccacagagcaggcacagcaggttcttatctgttctctcaagcttgctagccaagttcctccccacaccctaaattgtaatgactgcagcagatggtacatgtaaaattttaaattacatttctttaattttattaaagatagttgtaatgtggagttactaatttagatagattcagtttattagtcaaagtctagaagtgggattttacatggtacagttaatgcatgtcacagtgtcattgtaatatatggtatttcagtcaaaaaatgagtttatagtccacttcatttattctttacttaatgcttattgagcacatatgtattatgtgctgttggctgggaacgcctgagtgaataaaatttaagttcctcttacatttcaaaatagtttttggtctgcagatggtggctcttgcctcagtaacaagtaatattagctttgggagatagctgggggagggaagtttagaaagtggtgtcagacactagaatggaacctgggaaccagagaaggcttcgaggaaatagtatgtgagtcgagtcttgaaggaaaagtgggagttctcagggacagagatgagaggatccctggccgagggagctgcattatgcagaggcctgagctgagcaaggagggcgcagaggaggaagagctggacatgtggcagaggcccagctgcctgctgaccagactctccaggcaggacaggcgagcttggtgaggtttgactcatgggctgtggttttcacgtagccttttggcggtgagtgggcaggactgtgggccttccaccccacctctaatcagagcatctctgtgctggtgaaagtggggagctaaaaagagcccacttgagaagtgttcctctgctgttgaagaacaaccgaagttatctggagctgcagtgagcaagctggcaccctgagggtggctgggagggagaggttggaggtttcttccagaggacctgaagagccctcacttttttctgtttgcagtgagatggatgttccctcctctactccaggccagtttcccaaggcctctgggtaatgtctatgtgattaaacagtctcttgggaatagaactcctttcagttaagcagctctattttccagaaatccctggataattttatgaccatgtggtaaaggtaagggaccttgcgttaacttggggtgaatgtcagagagctgctgtgtgctaggctccgtgctgggcacccaggaaatagtccttgcccttgactctgcccagtctggactagaaaagtggtccttaggtggattgagctcacagatgtgttttgtttgtgcctctttctaaacattgaaattggttgctctgtcagtttcctatggctgctgtgacaaattgccacaaatgcagtggcttaaaacaatgcagttgtataggcgggaagtccgacacaggtcttaatgggctggggtcatggtgtagttagagctggttcctgctggaggctctgggggggaacccgttttctctgcctttccaacttcttgaggccttttgtgttccttggctcgtgctccttccatctttaaagccagctgcggttttccactctttcccacgtggtttctctctgaccctgactcttctgcctcccacttccacttttaaggatccttgtgattacgttgggcacactgaataatccaggatactatgttttaaagtcagctgattagaaactgaatttttttttttttttcagacggagcctctctctgtctcctaggctggagtgcagtgatgcctatctcggcgcactgcaacctccgcctccctggttcaagggattctcctgcctcagcctcccgagtagctgggattacaggtgtgcgcgaccatgcctggctaatttttgtattttttaatagagatagggtttcaccatgttggccaggctggtgtcgaacccctaacctcaagtgatccgcctgtatcagcctcccaaagtgctgggattacaggcgtgaaccaccatgccctgcctagaaacttaaattctaactgctaccttaattctcctttgccacaaaacctaacatattcacaggttctgaggttaagatgtggttatctttgggaggccactatttgttggtcatagttgccaatattaaaaacaggagatcttacatagcctcctagtcttgcagcttcattgacaaatcagaacacttggcagcctggggcctgtactgttgcctggtaacagtgggtcagagccagtgtcggcgccatctctagttggggcttgcgggtgccagttctccacagacttccaccctccacatggtgcctgcttatttcccctggttgtctggtccctgctctggggacacaggggcttacacagagtccagtcagggcagaatccccaacgcagggtggctgagtttgtctacctttctgttcataccctgctacttgcccccctgcacctcccccctcacttactgcctctataccctttccctgaagcctcttctgcctctgcctggcacacactgtccctcctcctctctgtgcccttctctctctgacccagggctctacattctgcagcatctctggtgctattttaggtgggattgtttgtgccatgattccttgtctcttgtcccctccttttctggcacccaacactagtacattctgatgccttcccttttatgtcttgcattggtgtttgtgaaaagcaagtctttatagtgtacctttagagcaatatccattaaaaaccaggatcacacaacaagcatgtagttgaacatctgtgtgccttgcactctcctagacattgggaatgccatggggactcctgccctacctctagttctagaagagggataggggaaacaaatggataggcaatcacagtgtcagcttcttactgcatctggagaggcaggatcttgcttccttcagctcccaagcctggaggtgagctctctttgcactgtgtgttgggtggggttgtttgtggggctctgttaaaagcgtttcagtggaagatccctgagtttgcagacatcgcctggacccccagcttgtagttgaattttttttttttgagaagtgcagttgtgtaatctcagctcactgcaacctctgcctcccaggttcaagcgatcctcttgcctcagcctcctgagtagctgggattagaggtgcacgccgccactcctggctaatttttgtatttttagtagagacagggtttcaccatattggccaggctggttttgaactgctgacctcaggtgatctgcccaccttggcttcccaaagtgttgggattacaggcgtgagccactgcacccggccaggtagttgagtgttgagcaggcaacttggaagcttggatatcatacaggttgagtatcccttgtctgaactgcttgggactagaaatcttttagatagtagacttttttggatttttcagtgtttgcatatgcataatgagatatcttggggatggaacccaagtctaaacgtgaaattcatttatgttttgtgtataccttacacccatagcttgaagataattttatataatattttaaataagtttgtgtacaaaacaaagatttgactgcattttgattgtgaccccgttgcatgaagtcaggtgtggagttttccacttgtggtatcatgttgctgctgctcaagaagtttctgattttggaacattttggattttggattttcacattagggatacctaatgtgagagagactaggccgcacagctccctgcactgctgcctggtggtctgaactggggctctgattgttttctgaggggccttttgtgtgccttctgtgaaggggcctgcattgagtgagtctacactgttgggctcagtgtggagcatacctggttgagccaccagagtttgacagcttaagggcagcctgtcattttatctacagagtatattaatgataaagatctttggaaacttacttaaaaacaaaatgaaacatttcatgatggaggatttcaaacagaaaaatagaataatttagtgaactcccatcacttagctttaacagttaattctaggctccccctacctcagatgattttaaagcaaatcccagtattcactttattggaaaatgcttcaatacatatctctaacagataatggactctttataaacttatttttaagtgaagactgaccaccagccttcctaattctgattttcatatttctgtgtttgaagctgattttttaaaattgtggaataatgattatatttacacaaaatcttgattgattgactgagatagggtcttgctctggccccagattggagtacagtggtgtgatctctgctcaccgcaacctccgcctcctgggctcaagccatcctcccacctcagcctcctgagcagctggggctacaggtgcgtgtcaccatcgccggcaaattttttgtattttttttagagatggggtttcaccatgtttccctgctccagactggtcttgaactcctgagtgcaagagatctgcctgcctgtgttggcctcccaaagtgctggggttataggcatgagccaccacacccagtcaccatgttaaggatttaaaagtgaacaattctgtggcatgtggtacatttatagtgttgtgccactatctagtttcagaactttttcatcactccaaaagaaaatccatactcattaggtagttgctcctcaatttccccagcccctggtatccgttaacctactttctgtctctatggggtttgcctattctggacatttcatataaatgcagttatacaatatctggctttttgtattggcttccttcacctagtatgttttccaagttcatccatgttgtagcatggatccaaacttgattcctttttatgaccaaataatattccattgtatggatataccacaatttatttatttagtggtggacacttgggttgtttccacatttggctattgtaaatagttgcttttttttttttttttttttttgatacagggtctcactctgtcacccaggctggagtgcagtggtgtgaccatggctcactgcagccttgacttcctgggctcaagggatcttcccacctcagcctcctgagtagctggggctacaggcctggctaattgttgtattttttgtagagacaatgtttcagtgttgcccaggctggtctcgaacttctaggttcaggtgatccgcctgcctcagcctcccacagtgttgggattataggtgtgagccactgtgcctggccaatagttgccattttaatttaacttgtcattgcttaatttgaaatatggtgatgtgctgcctggatcaaaaagaaaatgtcacatgtgagagggcaagacagtgatctgctcttgactctatttattgcaataaacacattttgaaagaacttataacagtcgtggtggctcatacatgtaataccagcactttgggagactgaggcaggatcacttgaggtcaggagtttgagaccagcttggccaacatggtgaaaaccctgtctctactgaaaatacaaaattagccaggtgtggtggtgcacatctgtggtcccagctactcaggaggctgaggcaggagaatcacttgaacccaggaggcggaggtagcagtgagccatgatcacgccaccgtactccagcctgggcgacagagcaagaatctgtctaaaaagaaagagagagagagagaaagagaaagaaagaaaaaaagaaagaagggagggagggagggaaggaaaggaaggaaaggaaaaaggaaaggaaaggaaggaaggagaacttataactgaagtatagtaaatgtaacagagctcacgcctgtaatcccagcactttgggaggccaaggccggtggattacttgaggtcaggagttccagaccagcctagccaacatggtgaaacctgtctctactaaaaatacaaaaattagccaggcgtggtgatgcatgcttgtaatctcagctactcgggaggctgaggcaggagaatccctcgaacccaggaggcagaggttgcagtgagctaagatcgcaccaccgcactccatcttgggggacagagcgagactctgtctcaaaaaaaacaaaaacaaaaacaaaaacagaaaactgtactatatataatgttagtatgtaagggacttagaggcctcttctgattgtttctggtgaccattagtcctgcttaacagactggtagtctgatgggcaaaccccacccttcttagtcttgaggtttgaggatgagtagtggcctttctgagcactggaatggaggtgggtgatcaacagcctctgggacttttccccactcctgagttacagggacagacttctgttttcatgagagtcattgacaaaggagcttgttttcctggataccaagtctgtgtctttgtttatgtacctcagcgacataggcaaagagtctgtgcctttgtcttacgtttgcattgttgtgatggcatggttgtcagtgtggaaagtgaagtggatttggtggtgtgtttcatgtgcagggcattggtttcagctaagagtttgtttccagctaggagttagagggcagcctctaatgagtggccaagtgctgactggtgggcacccttctcaagggctacttctgtggaactgtgctttgagagatgcagtaagaagtagcctgtgtcacgtctttggtggatgtggtcacagcgttggggtgcatactccgccgcatcatgctgtatgtcttcttttggagggtgtgagggaggcatttatctcaggtcccaggacaaggagaatcttctgtagtgaatctggtttgttttttatcttgtggagagtgtgaattctctggccactaggaagctcagttcagagccatcatttcctagctgtaatgtgacctgcactttgggttctaacctggccttctggctcaactcctccaccccctatttccttattgcttgagtttcttcatttactttatttatttatttatttatttatttatttatttatttatttattttcttgtgttctctggatttctttaacccagtgagtctcaactttgactgtaccttaatcagcatcctctggggagagttttttttttttttttttttttaagtgccagtgcttggcccccatcccttatgtttgatagattggattgattttttttgagacaaagagtcttgctctgttgcccagctggagtgtggtggctcactcatagctcactgtagcctctagctcctgggctcaaacagtcttccctcctcagcctcctgagtagttgggattacaggcatattcaaccacatgtggctaattatttatttatttgtagagacagggtctcattttgttgcccaggctgatcttgaactcctagctttaagcaatccttctgtctcggccccccaaagtgttggtattacagacatgagtcaccaaacccaatccctcctgttttttattttttatttattttttttgagacggagtcttggtctgttacccaggctggagtgcaggggcgcgatctcagctcactgcaagctctgcctcctgggttcataccattctcctgcctcagcctcccgagtagctgggactacaggtgcccgccaccacgcccggctaattttttgtatttttagtagagacggggtttcaccatgttagccaggatggtcgcgatctcctgacctcgtgatttgcccaccttggcctcccaaagtgctgggattacaggcatgagccaccgcgcctggccccagtccttcctgttgtaattgttctgggatggggcctgagcaaaaatgtttccaaaattctccaaaagctgggcgtgatggcttgcacccattatcccagctactcaggaggctgagaggggagaattgcttgagaccagaagtttgaggccagtctgggcaacatagcaggaccctgtctcaaaaaaaaaaaaaaaaaaaaaaagttccttaacaatttggatgtgtggccaggtttgagaactgctgctttaggccatttcatgtctttttagcatcaaggcagggataagtaatcaaaaaggatggagtctgggaggatagagggaccaaaggccagtggtatgagctcagagaagcctcgtaaaggggattatatagcgtccagtggttttcggctggtggcaccccgtgggaaagctctgaggggctcctctccttgtctagaaccacaggagagagactcagctcctggagctgagtgacttaaaatttagctgtgaagtccatgggcctgtctaatggtggcacagctttgtaacagggtcttctgggcctttcaggacccaagtcccacacttggagcctgatttgtgcttaatacctatttgctgtataatgtgattgcagagaagacttgacaaataaagagaacatttaaaacatggtctttgcaactaatctggtccttcctgtgctttaaaaaagaaaaaaattcccactgtccctgctttaaagagaaacaagaaattacaaaagaaaacacagactttcttgatttaaaagaatactggtagaagaaaatagcaagtcgcacaagaaattactatgtaatctgactgcaaagtgttgggtagattttaacatttgaagaaaaatgtttctttaagcaaatgaaaccctaatttctcccttccccctccaaaaaaccccctagattttcatttagctattttgtctttgaacaaaaatcttgctttttcccccttctttgcctttgccctctggtaatcagtagtttccaaagactgtgtaaaagtcaggtctaccaaaacagaatatatgccacatggtgtttgcaggctgtgtttcttttttgtgctaggtcccatggagattgtttggaatgcctgttttaatggtcatcagagaaaattcggaaagtatgcctaagtaggatggaccaaactagcacttgacctatagccttaggacctatacgtcaagtcctagttcggtctgtaatcaatgttaatattttgatttattttctctctctctctctcttttttttttttttgacacggggtcttgctgtcacccaggctggaatgcaatggtgccatcttggctcactgcaactgccgcctcccgggttcaagtgattctcctgcctccacctcccgagtagctgggactacaggcatgtgccaccatgcctggctaatgttttgtatttttagtagagacaggtttttgcatgttgaccaggctggtctcaaattcttgacttcaggtgatccacccgccttggcctcccaaagtgctgggattacaggtgtgagccaccacacccagcccggtttattttctctaggtaaattgtgtttgtttagtcctcaggggtctttatgacctctgtagccatcatgggatggctcagagctttcccttgactggctatactgggaagaggtcagctgccccctgtgatttgttttctattcaaggaagcttttggtcccagtctcccatgttccaggtggtaggtgtcccgcagcccgtcagaggtttgggaggccaggagggagctgtctagtaggggagaggctttgctggacttatagggcgtgttaaccagttagatgtgggtgagggaagaggaataagcactgactcaggtggctgctggtgctggtgctgatgctgatgctgagacagtgtggaggagaaaattggtctggtgaggaagatgatttcagtgctggacaatgggaccaaaaactgctagccctgtgtgcacttcagaggcttccagaatggggcagaaacacttactgctctctgggcttcagtctccccatctatgatataaatgagagagtgggactaagtggtcgccaggtccttcccaatgccagcgtgctttgattctgtcttttaagactctgccttcctgggtgagagtcgcattcctgtcagcagctatctggttgtttctaagcatattcttctccgtttggtgacgttgggttgggttgggttgacaatgggaaattggcagtgggtgtcagcatattctttccacacagtttattgcctctcttttcaggagttttcagaagggaaaacaggccaattcctcaggaaatgtgtttgcctgagactcagcagctaactgtgatttaacctagagagctagtccaggctgtgggtctagccagtgtctagtaatttccttctgggggcccttggcgtcgatgctgcgtgtggacagcgcggtttgtgagaccctgtgagcagggttcccacacagggaaaggtctctggttccctgcccactggtgttaggcccacctgactggtcacagagccaaccccagccttcccacaagagtgcagccacaggggtgagaccgctgtgtcaatgagtctagccgacggcccaccacgtgtgtggcccatacacattggaagtctatgtgtgtgccacatcatattaccaactggtggatatttaagaaatccatttgatagaattaaaaggctactgtgaaggaatcttttttccatttggaagaaaaaatcagtttataatttggaatggggaaacaaatattatctgccttcaaagaaaaaaattcattatataacatagcggctgctgaatcaagtcttggaaatttgtgattttttgaaaaccgccctataaggcttatggaaatacaatttggaatccattagcttcaggtgtttctccttttggtgatagggaaacatggttttgctgctgtttttgtcaaatgtgagagtcgtaggttattgatctggcatcttttgagtgttgggtcttttttttttttttttttttttgagatggagtctcattctgtcacccaggctggagtgcagtggcacgatctcggctcactgcaagctccacctcccgggttcacaccattttcctgcctcagcctcctgagtagctggcactacaggcgcctgccaccacgcctggctaactttttgtatttttagtagagacggggtttcaccgtgttagccaggatggtctcaatctcctgaccttgtgatctgcccgcctcggcctcccaaagtgctgggtttacaggcatgagccacagcgcccggctgagtattgggtctttaggggtcaaaacttttgatctttgcttgcagtttttgtttttttctcttttacactctccctgttccctgattaaatgaaggccaggcttgcctagttccagggaaaaggccaagggtgcctagagcaaggtggatgggactttgttcgcagatgggccttgagagagcgacccctcgctcctaaatgcccggaggaagggacggacttctttatctttaccatgggtattctgccttactgctttggcctgtggcgtttcttcacttgcttttcctcattttgcttggaatgtgctttgcctgttgcatacccacctcgtctgcccccttgcacactccatggctggcctaaaagcccagtctgctgtcctgtgccctttagacttccactgtaggattatgtttccacactccctgtggactgtgccactggagctctctgcagacagggactgtgtcaggttgacctccatccttcagcaccagcccagtgcctggcaggtagcaggaaagcagaagctgaggaaggacttgctgcacaagtggatgccaggagctctggttcttcccttcttgaatctgctaccttatgatgggagggacacagggctgtgctggatttgtgcacgatgctttggacagcccatgggagagggccaggaggaaggaaacccagactgagtggatagcaggctggatgggggcattgacagtgggggaagcattaaaggccatttatagccttccaaatgtgaagctggaggggcctggaagagagtcacagaaaggaagggacagacgcgggacggtgcagggtccctgccctccagcttcacaggtcttggtaatgggctcttacacgggttggtggcggaaggacacaggtggacctgggctggtggtcactcctgggctgctcttggccctggcatctgagacctgttggccaaaggctttgatgtggctctggtattttttcttttttttgagaatggaactttttttttttttaatgaaatgctcttttgaataggcaatacagtcacgtttctaaaatgaaaatatattaaaatatattttaagaaattttgcccctcactcctgatctcatctctgtcctccctcctccctggtaaccacctgtagcagtttgaatacccttctagtttttcttaatgcaagtacagcaaacacaaattgtgtattattatttctcccttttcagtaaatgaaagatagcattctgtgtgtactgttcttcatcttgtgctttttttaacttattgtagagatttttccatatcagtgcatggagaatggttgtcattctctttcagctgtgttgcactgtgaagttgtccctgtttgaatactcacccctgaggaaaggcacctggctgtttccagcttgtttcatgacatgccggcgacagttgtctcacgtgcacatcgtttcccacattgcagtggtcctgcagggtggcatcccgcaggcacattgctgagtcaaagaggaaacacagttgtaattttgacagattttgcccagttgccctctacagggcttgttccatgttgcactcccactggcggtgttgatgcctgattccccactgactcgtcaacacaaggtgtagtcaaatgcttggagttctgccagcctgacacttgtaaataatatctcagtatagttttaatttgtatttttctgaagaggagctgatcatgttgtcatatgtttaaggaccatttatagttttctgtggacagttcttcgatttttctcttgggttattggttttttctcaatttctgaaggtgttttttatatttttggaaggttagttcattgtcttatgagttataaatttttttcaggctaggaattattctgatctaggcagagtctttaaataattctattcctccccttccctctgccccatctccttatgtttgaagatttggacagtggctttgggacagaaccacacctttggcttccttccaggatttaagttaattggccttagacacattttcggtatgaacttatgatagcgtggatgtgtttgaggtgtatcaggatgggctacatgatgtgagaacagccaaccctctcacctcagtggcctaacagcagaggctcatttctttttcatggggcatgtccagtgtatgtagtcaggagacttcactcatagtcactcatgaacctaggatgatggtggcacaagctttttgttttgtcttattttgttttgttaacagttttattggctgggagtggtggctcacacctgtaatcccaggactttgggaggccaaggtgggtgtatcacttgaggtcaggagttcgagaccagcctggccaacgtggtgaaacccatctctactaaaaatacaaaaatcagccaggcatggtggcgcatccctgtagtcccagctacttgggaggctgaggcaggagaattgcttgaacccaggaggcagaggttgcaatgagctgagattgtgccactgcactccagcctgagcaacagagcaagactccatctaaaaaaaaacaggccaggtgcagtggctcatgcctgcaatcccagcactttgggaggccaaggcgggcggaccacctgaggtcgggagttcaagaccagcctgaccaacatggagaaaccctgtctctactaaaaatacaaaattagctgggtgtagtggcacatgcctgtaatcccagctacttaggaggctgaggcaggagaatcgcttggacccaggaggcggaggttgccgtgagccgagatcacaccactgcactccagcctgggcaacaggagcgttaaaactccatctcaaaaacaaaacaaaacaaaacaaaaacagttttattgatgcataatttatttgccatgcaataaagttcaccatcagcataatcttattttagaacattttattacccccaaaagcaaccctgtacccattaagcagtcatttcccctcccattctctccagcccctggcaactgcaataaagttcaccatcagcataatcttattttagaacattttattacccccaaaagcaaccctgtacccattaagcagtcatttcccctcccattctctccagcccctggcaactatcagtctgctttctgtctctgtggatttgcctgttctggacattccacataaatggagtcatacagtgtgtgggcttttgtgtttggcttcttacattcagtgtaatgttgtcgaggttcatccatatggtagaatgggccagaacttcctttttaaggctgaataatattccattgtgtggatagatcacatgttgttgatctgttcatcaattggacaaagttgtttccagtctttggcagtcgtgagtaacacagctgtgaacatggtacatgagtccctgtgtagacatgctttcctgtctctggatagataaggaggctccatcctgacataggcacccactgtcaccaccgcagggaatgtggcacctgccttttactgttcagcagagagtgacacacatcatttctatctcatctcattgccgtgccatggctgacttcagaggaggtgggaaaatgcacttctgtcataggcctagaagtgggtgaactggaaatacttggtgactaggatcagtactttagaagagaagagaagtggggcccatccctggggcccatgagagtggttttgtttggacaagtcattccggaaagcgttcactagtaaggagggagttccaggatagaaattacgtgggttggccttgaaagctggttggtggaaaaacctcacatcttccaaggagcgtcttagatgggtatgatgatattggaacagagaagggcaaccacatagaagtaatataagtagaatggaggtttaggattgagcacttctgagtttcacaggaggcattgtggctgagagcttcatcccagttctgtgatttgctgtatgttatcctctctcttgtgtaatgcctgccttgcaaaagtgcagcaagatcagtgccatgaaacccctgggtcagtgcctggcacatggtaggcattcagtaaattatagctgtcaccttggtgcatttgaccagcagcagctgagtctgcagtcactgagtcaccagacctggccttcctgaggccttgggcttatgttttccttgtgaggcataaatatgctgaagaacatccctgttttcttggcctggtcctccctgtggtggctgaaggaaagaggggggctggagcgagaaggggggttaggggcatggatgtagccagtgtatatttggagggcaagtaaacagttcttccttggcctctcggcacaagtttctaaagtagagcgatttctgagtttaggagcagctgggcagatctgcacacgcacccagttgtcagtgctggaaacgcgcccctttattattatttttctaaacaaagcaggacaatggcagtgtaaacattgtttgaacaaaaagcatttggccaatggagataaaaccaaaaggaaaataacaactttgatttccttttggttttgtgttttgacatttggtagcatacttctaatcttttaggaattataaaaattatatggtttgcgaactccagtttgtttatgctgttaaatttagtgcgaagtaaactaaaaaattcccctcctgttgggatgtcagcttgctcccatttttgtttttctttgagaggcatggtcaaaggaccagtgggacctgaagagggcccgtcaaaagcatgtgaggcatgtggggaaacctgtagtgaagcagaaagtgcagccttatttcctacagctctctcatgttccttatcttgctgattctcgctggctgccatttccattttacaaatgaggaaactaaactgagattcagtgaggtgactaaaaggtgctgggtagagcagtgatcttttcattctgccaggtagttattttaaaacttaccaatattcataggccatgttttatgttcagtgagggcatttgtggtttggtaagggtgtagagaggatcagagagcttggaggaagggagagagaaaggggggagtgtgtgagcaggtggggctggactcggtgccctgtagagtcattcattcttgcagcagatgtgtgccaggcactgtgccaggcccagcatgcagcatcaaggagacagtcggggtctctgtcccttgagagcctgcagtccagaggtcgtgggaggaaggaaggagggtggagggaaagccggaagcccaggcgagctccaaggcctctggctcagtcagctgggcagcaggtggtggatcctgggcagagcatccctggagggaaggagaagggggcaggtgtggagctggggatgataggttcggttttgtcctgaaactggaggggaaggtggcatggtgcagaggtgtgtaccagtgaccaagaaggtccggtggccaggcatggtggctcacacttacaatctcagcactttgggatgccgagacaggaggattgcttgagcccaggagttcgagaccagcctggccaacatagggaaaccccatctctacaaaaaataataagctgggcttgatggtgcacacctgtacttaggagactgaggtaagagaatcacttgtgcctgggaggtccaggctgtaatcagctatgattgtgctactgtactccatcttgggtgacagtgagaccctttctcaggaaaaaaaaaaaaaagaacgtctaggaagttacatgcggtctcacacaaaggtgtctgaactattcgttggtggtcattagaaggtgaagacacttcccaagcatgcactgctctgcatggggcagaaaggcatgatctcttcattctctgcttccctggcactggatggttctcttgtgtccctgccctgctcttggccctttcttggacttggccgatgtctacttgcctcctccttaattgcattcttgtccccatcttcctctgctctctctctctcccttatgcctctcacctgctcctctgagatgaacatgttggccacagtgcccctcctgtgccctggtcctgggcaccagctccactaggccattttcattctcctccaggcctgtcctgccagcacctccagccatgtttgtttgaaataaaactaagtatgctgcctcctgccttcgtctggaacctctccaccttccctttctgttaagggtgactccgtcctcctggctattccaccccttctaccccacccacactgacatttggtcatcagggttcatgtttccactctgtttatgtccatcaccttcctttcccattcccccgcagctggattcaggctctggactctgctcattgtgttgtgtggcttctcagtcgtctttctgtcttcctacttccgcctctgccctaatcctttctcccactgctgcttgatcaagattcagaaataccatcctgaagacgtgagttccctgctccaaacaaaaataaaaaatcaaccttagtagctttgccttccccagtatttcccaacataattttaagtggcatacagttgaatgttcttagttttaatctttgtcttagaaatgccatagtattttggcagttcctcaaaagttaaacgtgtagttaccatatgacccagcagcttcactcctcagtatatacccaggagaactgaaaacttgtccacacaaacaccccatagatgtccatctcaacattattatttattttatttttttttttttttgagacggagtctcgctctgtcgcccaggctggagtgcagtggcgcgatcttggcccactgcaagctccgcctcccgggttcgtgccattctcctgcctcagcctccggagtagctgagactacaggcgcccgctaccacgcctggctaattttttgtatttttagtagaggtggggtttcactgtgttagccaggatggtttcgatctcctcacctcgtgatctgcccgcctcggcctcccaaagtgctgggattacaggcataagccaccacgcccggccatctcagcattatgaatatgaatatatgaatattcttcatggcatgatagccaaaaaaattagtaacaacccaaatgtccatcaactgatgaatgggtaaacaaaatgtggtccatctttacaaaggaacattatttagccataaaaagtaatagaatactggtacataatgcaacacggatgaaccttgaaaacactgaacctgccgggcacggtggctcaggcctgtaatcccagcactttgggaggctgaggcagacggatcacgaggtcaggagatcgagatagccaccacgcctggctaattttttgtatttttagtagagacggggtttccccgtgttagccaggatggtctcgatctcctgaccttgtgatccgcctgcctcggcctcccaaagtgctgggatgacaggcgtgagccactgcgcccggcctaaatgttcacatattatttcatttgtgtgaaatgtccagaatagggaaatccatagggagtagatttgtcattgccaggggctgggagtgaggacgtgtgtggtgaccactaatggatgttgggcttaattttggagtgttgaaaatgttttggaataatagtgaaatagtgatgattgcacaacattgtgaatatactaaaaaaaaaccccgttgaatcgtatactttaaaatagtgaatttaatgctatgtgaattatatctcaatagaaacaaaacaaaaagatccccccatatgccatagcagtaatacctgacttcgtatatgttacttaaagtgagtatttgaatttaaaagtaagttgatgtgaagaaaaatatgaagcaagcagtagagcagctttttttttttttttaaaaaaagacagagttccactctgtcgcccaggctggaatgcaatggcacaatctcagctcactgcaacctctgcctcccgggttcaagcgattctcctgccttagcctcctgagtagctgggattacaggtgcgcattaccacacccggctaatttttgtatttttaatagagatggggtttcaccatgttggtcaggctggtctcgaactcctgacctcgtgatccacccacctcagcctcccaaagtgccgggattacaggcaggagccaccgcgtccggccaatcagcttttatagtaaggatttgaatgggctaattcccgggacagtgcttgcacatagtgggtgctctgtaagtgttagtcattgttactattgagaagagatggcaaaaatcttgaaggtgaacaactcaatttggcaagtgcagatttcttgtgtgcctagtgaggccctgttggtgcagcctcagcctgccgcagcctctgcattcccagctaccttagtggcaggtgtgtctccctgagggttctcactctgcccgcagaggcctcctcttccatactcaggcactcatccctctcattcttcattgcagtgcccttgatggccccaagtcttgtccttgtcttctcaggagctgcctggagcacccagttgcagtgttttgttgctcccccagtctagacagggtgccacatctgtgcttgttcagatcccctgtagctgctggcatggggatctggtcacacagtgagtgtgtgaaaaatacttggcaaacctgtgtcaactaaactatgaatacatctttttttttgaggcagggtcttgctctgtcgtccaggctgaagtatagtggcatgatcatggctcactgcagcctcaaactcctgggctcaggcgatcctccatctcagtctcgcactcccagaagtgttgggattataggcgtgagccaccacacctggccttagtacatctttataatgacaaaacgatgttataaatcaggcaaaaatattttaaaaatatattgcagagtttgtatatcttatgaatgagctgttctaggaacagactctagaaaaagctgacccacgtgtcccaggagacatgcatggctatagaagcacttttcacagtagcaaaaatctggaaataacccagatatccatggacaggaacacgggtaggcacatggttaaatattggcatgatcacatggtacacagcggtgacagtgggtgagtgtcagctagctgtgcataacaacagagagaacctcagaagcagtatagaatgccacaggcaggctggggaagactgcatactgttcagttttactagtgtgtgatacaattatgttcttttttaaaaagtgagggactgaaaacccaataccagggctgtttgccttagaggtcaaggaggtggggagagggaagtgaggggagccaggtggctggacatggtggtcatgttccaggccttgaggggactgtggagtcatggggacttattttatttgtcctcacatgtggtttgcacatattctcttatatgtacctaatgttacataataaaacatttaagaaaacagaagaacaacaagaaaacattagggctggctcataccttttgtggggtagactctgacattgaagagttgggaaggaacatttcctcctaatatatccagtcagtgttgcacagtaaataaaacactgggaatgtctccagcagaggaggaaagagggaagtaatatttttactctgcaccaaaaaaggaagtttacctttcaacatgaagagactctttttcctgagtggtatttcagatgacaacagctatttcaaaggaacagtgcaggtttctcagggtgttaaagtcggtgtgactgatttagtagaagacactgttaatagccaaagaggcatcatttcttgaggatgtgagttctgaagaacacgtttttaggaatagttttagagtctctgtgttgttattttggacctccaccctgactgactccattgtattgccagcgtgtagaaccttccacatttcaaggtaaaagtttctttgaatagcgttaaagcctcttcccttttgctggctgcactgaagggagctgggaatgccaggttctgtcctggcttagcactgaatggctctgggtcctggcatctacacgtggttgacttccaaggcccttctagctgtagcatctttgctcctgcttgtttgacttggtgagagactggggaaaggatccattatggcccacaaaacatgaggctggaaaacagttgtttccatgccatcttttggcctcaaacatctagacaagagggacctttgtaggcctgcagattcagcaaaggaaagtttcttgttcttacgattttgagcactgaatttgtctaaagctacaaagaatgagaataagaatagggattaagaggatgggatcagaagtcagagtctgagagcaaatcctagtcccacctcttgctggcagtgcagccttgggtcagttacttagcctctctttgcttcacttttcctcctctgtaagatatgaataagaagaataactcctccataggattgttatgaagatgccatcagtggacacatgtgacctgctcagttagtattcactagcctcttcttagagagccccttctgtttcttactgctcttttaattctgttctgttactagtatcaaagagcacatctgagactttgcttggaaatgccagctgcagaggagaagggcaggcaagattgttgatggttttgaacaggttgtgtgtatagtctagagagagatgcttgtggacaatgccacccacccctctggtaggtgattcccacccagtgtgttctcatagggatgcctctgtaggctttcatctcctgccgagctgtccttaggaacctgctgagaaatgtccctgtggacattgcaccttggcaggacacagtagaggaggcaggtatttggacacctcttatttgccagtcgtactcttaccaaccctcacagccatgctgagcagcacctgttacctctatttgagaggtgtggaaatagaggctcaggaaagctcagcttgcctcggaccatgcagctggaaaggcaggacataatccctgtggccggagtgagaactacatatttcagccctaggctgctgcccaggctgctggtgtcgctcctgagtccagctgtaaggggcatcgagtggattctcaggccccgtggtgcctgggcttcggcaggtgctggttcgtgtggagcatgtgttaagcacctggtagggctgttcctgttcccaggcagtttattgttaggcagacaatacagcacttgccctttaactcaagaaatggagaccgaaagggaaacaggaactgggagaacagcctcaaggtgtgaactctggcagtctctgagtagagagataatgggtatctttaacagtgttcttattttttgcttctgtgtcacatggaaggtgtttgttgagggctgagtgtgtgccaggcactgttctagacagtggcaaagaggctgggccttggtctcaggggggtggtgtgggggcaggagagaaacagataaacaggcacataagaaatgtcagatagaggaggggctctgttccagatgacagctggtgacgttgatagagagtgcctgatgggttctgaggaggccatgcgatctgagtgacaaggagccagtctagtgacagatagaggaaggacgctgggtgggggaaatggcaggtgcatagaatgcaaggcaggagccacttccggtcatagggaaagtgactggaaatgagagtgcagcatgtgggtggcacataaagagttaaccctcagggattgctctgccccagagcccacctttgggatgaaggagctcatcctttgagcttcagctaaggtgagcctgctcttgtggtctctaagatcctggctcactgcccatcccgcagtgctgcttagatgaggctcagcggacatcaaccatcactaccaccagtccctgcaagtaactccctcagaaatctgcattgttcagaaatctaccgtgttcctctgaagctactatggaaagagttagatgtgacctcctggaggcacaggtgggaaggcagaggtgagcaaaccgcttgtttttctcacagctgtggtcttgcacttgtacatgcacagtgtaaaaatacctgttccttggccagcatctggagctctctttgagaaaatatgttacatcactactgtgcccgaaacccaaagtcagcaggccctgcctgaggggatccactgcccctcctttatttccacactctcgcaggctcctcgcgagatggcgacagcccagcagttagcaccaccacatccaccagccaggtctaaattaaacacgagatcatgggaatgtagattttcccatgcagctctgcatgtttttcagatgtctcaagctggaaaattatgctgatcaaatggtagtccatagctcggcctgtcctgtggggtgggggtgagtagccatcaaaggctcccgttcactgcacccagtctctggttggcttcatcgtctcccatcagccagtgttttctctagcacagccacagtgtgtgagaaatggggaatctctgcctaagggtcacagcggccatcctcagaggagggaagggttctgaaggctgcttttcacatttccaaaggctgaagggaagccctagttttttgcccaccatgaagccccacagactaacaaaaacgtctgctgcttggctgtggctggaattctactccctcagttggtgacctgtggctgggctgatcagaagcttgggtttctcatgacaccatggagatggcagggaattgaatcactggtcagaatgggggcctttgggactgaaggatttggggtgagcatctggtttaattccatcattttagaagcgaggaccctgggtactggcttcttggtgctacagagcggtcgcagcattggccctgatccctggattcccatctcctctcactaccacatcatgttatttgcattttggcatgatttttaaaagaatgctgttcataatttggtcatttgtaagactgctttgaggaataggagaggtaggggagcattcaacaattctcatttgcctttatggagtgttgctgcctgcactttgtgctgtcacagtgtttgatcctctacactgagggggaggtgcagctccttgccatacccctgttttcctggattggcaggaacagccaaaaccaggtctccagaccccatcttttcttcacacagtctttaaaaagactgcatttcctcacctgcccatgtattctacacccacaggctgctcctcccagagactaaatgataagggcatgttgataacaagaaattaaattccttgtgtatgttttggtacttgctttctgcttttagaaaattgagtacatatcaagttctaggaggccaagtgacatctaatttgagctctgctgtgtctgttccagtggctctcagatcctgggagaagctgcctaggtggcttcttgagggtggacctcctactccccttcaggagcctctgcctggtcatctcgtcctgcaaataaagtggccattctgtgggtctgctcagccttttttttagaggttggttcttcctatgcagtcagcccttcctggctcccctttggcagtaggttaactgacacctgcagggatctttcttccttagaagaaagtcccaggggagacaagtaagcacatgggcagtttaccttttcctgctctactgtctagaagtcaagtctgaaatgtttgtttttcttcaaaattctttaagtatatgagtataaaggttttttagcccagtttttggagactgataaattttttattaaaaaaaaaactattcatttttatagacagggtcttgctaggttgtccaggctagatttgaactcctgggctcaagtgatcctcctgcctcagccttctgagtagctgggaaacaagtgtgtagcaccctgcccagctgatataaaatttgatttctctaaccaacaagaagtcatcagaatatagatgcccactttcagttagtgaagatgtttattttttggctgaatctcactgtttttctggtatgagggaaataaaggatttttttcttttcatttctctacgggatgagcaacagttattaggctttaagttattgctagcgtggctgaaacagagtcataatagtcttttctcttttggctgaaatgatgactgttgaaaagaatgtagcactgtccatattgtcctaactggcctgttgtcttctggagagcccgtgtggtttggtcatgtggtctgtggtctcagctaccccaactgggcctccttgtaatgatcgttgtacccttttctccggtaggaagatggagatgtttcctcactcgtggactgcacctcaggaaagataaagccagtgaattgaggattgcggagtattgcacacattcaggtgtcctgcagtggacaccatgacactgactccagcatgcctagaaatcaccatgggggcttaagagagtggcaccccctcagctctgcccccagaatgactggatttttgaacagactcccaggaagttctgatgtatctggttgatggaccacactggtggaacactgtgggaaaggtggggtgtacccctttcccaagcattctctgtcatctgcttttagaaaaataaagtacatgtagaaacataggaggctgccagacatacataggtggagctaccatctgaggtgaagatgttcaggtcaattaattcacccgtatttattgattgggactgggttttcacaatgttgattgacctgtgattgttaggtttggggaggggagtggaaagacagctccctgacagccgagcgtgatcttcaatgatggctgctccccatagtttccttagggacttgatgtagaccccagctgaaaggtgaacatcctcctctcagcacacgatcagccacaccttggtggcacagaggcacggggtgtagagatgtgtgccttcaccacaggcccacctgcactgcttggaactgtgaaaagcctctgtctcccatgatggggaactctagatttggaaagaatttccccacccagcatctcaagccttcagagcacatttttatggaatacttcttgcctcctggggcataaccctagccttggaaatttttttttccagttttgttctgtttgctgttttgtttagtctcttttcagtctctactctcatttgaattctgactgtgttttcaagtttaccagaaaattctcccccagcttgtcccctgcatgtatggggatctagctgttattttgtggttcccgtcatgagtcactctcaaaaaagagcagatgatcccagactttggttggggttgcctccttcacagggagtgccgagccctcctggggaggatgcagttcttccttggtcagtcttgggttgtgggtcaactgtggctggggggagcctgactgatgtctctgcactcctacttgaggccctgttggaggttcaggggagcgcccatgctctgtccttttgttgtttggctgttgttgcctttctacctctggttctctcaggtgctttgtgcacagggtttgcagttgcagggatcaaaagcacacattgctgtaggttacagcatgagaatttcagggaataaatggcttcatgcacaggtagacatagaggtgcagaccacgtgttgttatgtcttgtgccttctcctttccttggcttcttgctttcttctgtggctgcttcaatcataggtaaactctgactctgcccctgtggtgtgttccagcagcttagcaaccctgctggtttcccagaagttttaggaaccatccagaggggtctacaggtggtccagtctggattcttaacatatcactgatgtagctgctgggcgggggaactgtggggctttgattggcctggtctgagtcctgggcctactcctggccagtttcccaaggatgactgaagtactctttccaagaagagggggattatggttgttacataggcaaaaccaatgattcagttttcagaatggaaatgaaatattatttggtttaaagaaccttacctagttctggggactaactgtagaaaagtgagtattcgctttcatattgaatagatatggctttttacgtggaggctctggagctcccagggcatttcagaaggcctgacaatttctgcattgctcatggtgctacttccccaggccacctcaagcattcagtttctttgctgttggttggaatttattgacactgtgtggttaacaattgttatctaacatgtgtcagcaccctgatttcttagtaaaatgaattattaattaatacaatttcaaaacaggtttttagggctagggctggagtggggaaggtgtggctggtggggtggtggccaggagcttctgcctggtcatctcttcctgcaaataaagtggccattctgtgggcctgctcagccgtttttttgagacaaagttgctctttcacccaggctggagtgcagtggcattatcatggtccactgtagcctccatctcctgggctcaagggattctcccatctcagtctcctgagtagctgggactgcagatgtgcaccaccatgcccagctaattaaaattttttttttttttttttttttttttttttttgtagaaatgaggtctcaccatgttgtccaggctggtcttgaactcctgggctcaagtgatcctcctgccttggcctcccgaagtgctgggattataggcgtgagccactgcacctggccctattcctgtgacagctctcttggaaggtacagaaaggtttgtttgccttgaataatgaatctcactttacaccttgctgtcttcatttaaaaatatttcaagttttgacagaattgtacaagttcatgtactttatttatcaattagcatcaaatagttctaggtaataactgatgatatgatgatagaactggatttctaaaggtgtttctagttactgaggatcctttcaattgtcagtatgtaatttatgagaataagttttttttttttttttttgctgtattgggtctaaacttttaacagagtttaatactgtttttccttgttttgacaaccctcccacctccacctctaacatccatatctggtgtagaggttcataagaaattattgtgagctgatcacacacttcctcaggtttgagtgaggagcccagaaggtaacaaatgatcctgttttagttgcatttgcatgtgcattagttcagtctcagcaagctggaaacaagaaaattggaaaattgagaaggaaagtggagcgtgcaaactatgcgaaaaagagggagaagaaaacaaaactcagattctagaaataacagaatgtgcccgggcacggtggctcacgcctgtcatctcagcagtttgggaggccgaggcgggtggatcacttgaggtcaggagtccgagaccagcctggccaaaatgttgaaaccccatctctactaaaaacacagaacttagctgggtgaggtggcaggtgcctataatcccagctacttgggtggctgaggtgccaggatcacatgaacctgagaggcagaggttgcagtgagccgagattgcaccacggcactccagcctgggcaaaagggtgagactctgtctcaaaaaaaaaaaaaaaaaaaaagagagaaataacaggatttgccgtggagggtggtatatgtttggagcttggagcttgctcttgggatggactcatggcagatgtttgctgggagagaagatgtttaaatgtttacaggctgtcctgtggttgaggggaaacagtgaaaaatggggacctgaggtgtacaaggtcaagtgtgtcaaagtattggaagtccaggtgttcagctggaatagctggagctttgtgcccactggcactgctggagtcctgcttcatggcccacgcatcatgggctgtctcacggttggaataattagtttcagcctccaaagtctcgcttaggtgaggtgcgtagtccagttggcctggaaaatgaaaagctttggccgggcgcggtggctcacgcctgtaatcccagcactctgggaggccagggtgggcggatcacgaggtcaggagatcgagaccatcctggctaacacggtgaaacctcgtctccactaaaaatacaaaaaaattagctgggcgtggtggtgggtgcctgtagtcccagctactcaggaggctgaggcaggaagaatggtgtgaacctgggaggcggagcttgcagtgagccgagatcacaccactgcaccagcctgggcgacagagcgagactatgtctcaaaaaaaaaaaaaaagaaaatgaaaagcctccagtgacttttctcctagtgaggattatttatttgtttgtttatttatttatttttagagacggggtctcgccatgttgcccaggttggtcttgaactcctgagctcaagtgatctgcccgcctcggcttcccaaagtgctgggattacagacatgagccaccacacctggtcctagtgaggtgtattagtctgttttcacactactgataaagacatacccgagactgggaagaaaaggaggtttaattggacttacagttccacatgcctggagaggcctcagaattatggcaggaggtgaaaggcacttcttacatggcagcaacaagagaaaaatgaggaagaagcaaaaatgcaaacccctgataaacccatcagatctcatgagacttactcactatcacaggaatagcatgggaaagactggcccgcataattcaattacctctcccgggtcccttccacaacacgtgggaattctgggagacacaattcaagttgagatttgggtggggacacaaccaaaccatgtcatgaagatttcttttggtttttctcttttgagacagagtcttgctctgtcacccaggctggagagcagtggtgccatctcagctcactccaacctctgcctcctgggttgaagcgattctcatgcctcagctacccaggtagctgggattccaggtgtgcaccaccatgcctggctaatttttatattagggttttgccctgttggccaagctattgctgaactcctggcctcaagtgatcctcccacatcggcctcccagagtgctgggattacagtcatgaaccaccgtgcccggcccctagtgaggatttcttagtgaggatttcgaaagctgctcctgtctataaacttcaagaaaatagcaggcagccatgcaaattatataggccttatttcgtttttttttactataaccagtattttattattttattagctttttcctttttcctgaagtttaagtatttcagagaccatcagcagatgtccttgcaagttagtctgttagagaaagcccctgccttggtcaacagcccctgtttcttaattgtttggagttcctttcccagcttatgtctgggagggcagcggcaccttggcccttgctcacaggaatcactgccttttctttgctgccaaaggtctaggaggctcattgggagccctggctgggcctcacagcctccctgggaggacactaggcccagctggaggtcttctgcttccacccacaaggtcaccagatgggggagggcagcagagcccagagcattgtttctcacttaggaaagtgttcctttttttgttttttttttttgagacagagtctcactgtgtcacccaggctggagtgcagtggcgcaatctcagctcactgcaagctctgcctcccgggttcacgccattctcccacctcagcctcccaagtagctgggactacaggcgcccgccactatgcctggctaattttttgtatttttagtagagacggggtttcaccattcacaggatggtcttgatctcctgaccttgtgatccacctgcctcagcctcccaaagtgctgggattacaggcgtgagccaccgcaccctgcaggaaagtgttccttttttttttcttaggacattctcaaccatttgagaccattttactgggaaggaggtggccaaagtcctcttttttttctttacttttcttttcttttttttttttttgagacagggtctcactctatcgcccaggctggagtgcagtggcgcaatcttggctcactacaacctccacctctcgggctcaagcagttctcgtgcctcagcctcctgagtaagctgggattacaggtgtgtaccaccacactcaggtaattttttgtatttttagtagagacagggttttgccatgttgcccaggctggtcttgaactcctgagctcaggcagtctacctgcctgggcctcccaaagtgctaggattacaggtgtgagccaccatgcccagccaaagtctttgtcagtggtgaatcctagctctgcccacttctctgagaagctgaagagtcatacctgctctacatcaaatggaacaacaaattgaagggcctggtggtccctggcacattgtaaggctcctgaacattaagtacctctgaacattactattgattttgacacatatttgccctttaagctgggaaatattcattaaaaattaaagtgttctttttctttgtgaggcccatcgtatctttgccagcagtgaatgttgcatcatgaatgaaaaacctaattacatcaaatgtgcaggtcaccgtgcaaaagtttttatccctggtcctttcacagcctttgcagaatatgcctgcttttagctgaagccctgttctgtggcttcagatagagtcagattccttgacatatttgaggatggagagaaggcctccttggccagagcagatgtatgggttattaccagggtgaaattttatgagctgtcccctttttgtgtgtggaaaaatcatacaaagtgctttttcctattttctcacttaacagcaatcaatacagataacttctgtaactttctccccacgtaacaagcaagcagtcagttttgcaggacaccagctaggtgtccttcagttcaactctgatatttacctggagatagcttcagatcccatatgttgagggctcagtcccacaagaacactcccttcttcccagcagtgcaagtccacgcctctggaacttctgaccaaccagcttcaagttgagaccccttctttgggttcaattaattcggtagagtggctcacataactcagcgaaattgacttatatttacctatttattataaaggatattgcaaaggatacagatgaagagatgcataggccaggtgtgggagaaggagtgcagagcttccatgccatacctcagtgccaccgttcaggaacctttgtgtgttcagccatccagaagcttcctgagcctgtccttatgtctttttatggaggcttcattatggagacatgattgactaaatgattggccattggtgataaacctaatcttcagtccatctccccttaccgggactgatcctgccttggtctttctggtaaccagccccatcctgaagctgcctagggactgccagccctcagtcaatcattcacatgcaaaaagacatcactgtggagattccgaggattttaggtttggaatccctgccaagtgcccgggatgaagaccaaatacatatttcacaatagcaaacccttctttttgtgtgattgtttgtgatgagtagtcattgcatttcctgtggcttttccttgcttctgccaccttttgtttacttgcttgtttttttgatgtgcccattacccatctgaggctttagatgaggaaggtaggagctacctgttgtttctgtggcagaaacatcttgagagtaaagaccaccacaggaagaaagggaggcgcaggttctgggcctggagtgaccttagtcagctgaccgtgtgattccaggcttcggttcctcacttgtgtagtgggaaaaataatccttcctctgagggtttgagggtggggggtggacagccaagcaggtggtcagaatggtgggtggagccccttgcttcctatccgggccctagctgtcctaatctacctggggcaatccctggagacttctagggcctcagttttcccattttataggtaaggaaccttcatcccctgccagactgtggccttcttgagggcagggactctgtttttaatctgtaacattcatttatttaacagtgttcatttctgtgtcgggcacagtgctaagtgctgggtgctcactggtgatgaggcagatgaaggttaccaaacttgtggacaggagcctcatatcagagacgtggacctcactgtagcctggtaagtgagtgttatctggaggaagagaggggatagatgatgtgtttggttggagcgagttaatagatagccaggggtctcagttttctttgtgaaatgaggggctgggctataaccagattagttttaaggctgtattagcttgggccagatgctggaggcttctgaaagccaagtggaggtctttatcctttttctagaattgctgttaggaatctttataaattcttgaacagggaaggtcaggcgaaaagtggttgtcaaggagaattttctggacattcggaaacacagtggaccaaagcagttttgaaggtattgacaggcatttttgagttaagatagacctgaaattagtctctttcttgtcctcatgtgtatttttttttatttaaataaactttaaaaaaatagagatgggggtattgctgttttgaccaggctggcctcaagtaatcctcccatttcagcttcgcaaagtgctgggattacaggtgtgagccaccatatctggtctcacatgtaattttaaatctgccaagatcagcttcccccagtgtttccgattcttccacagctggcttttgccaggcagtgaaaagacaacccataaaatagccattccagtggaagtgttttgaaaatagagcaatagtcatgatgtttacttcttttctcctaaaggcttaaacttgagtgtaagttttattcattgttgactggtgatattgattttatcttgggttcgtcctaaggaggctgggtatgtccactcagctccccagttttacccagtacctgctgctggaccacagtctcccaccctcacagggggcttacgtcgcagtggaatgggttttctctttctctaggtcatggcttccagcttttcgaatctgaggctccaaaggaggaaatgaccattcagggatcttactccagcttgattacggagactgaaccttcatagggtgcgcacttaccaaggacaggaaggtttctctgtttgaagggctttaaacttataacaaagaaaataaaaatgacgacttcgtctatcagacggcagatgaaaaacatcgtgaacaattactcagaggcagaaatcaaagtccgggaagccacctccaatgacccgtggggcccgtccagttctctgatgaccgagattgccgacctgacctacaacgtggtggccttctcggagatcatgagcatggtgtggaagcggctgaatgaccatggcaagaactggcggcatgtgtacaaggcgctgaccctgctggactacctcatcaagacaggctccgaacgtgtggcccagcagtgccgggagaacatcttcgccatccagaccctgaaggacttccagtacattgaccgagatggcaaggaccagggcatcaatgtgcgtgagaagtcaaagcaactggtggctctcctcaaggacgaggaacggttgaaggctgagagggcccaggctctcaaaaccaaagagcgcatggcccaggttgccactggcatgggcagcaaccagatcacctttgggcgaggctccagccagcccaacctctccaccagccactcggagcaggagtatggcaaggccgggggctccccggcctcctaccatggctgtgagtaatggaagtgcttctcaccctttgccagagcagcagcaatgggtgacaggcagggtgggtgtctctgggcttagggagtggtggccactgcagagctcgaacctgtcctcagtacccagcttttggtggcccaggcaaattgtccttggtctggattgagttttggttataaagggacttttagtcccttggctgctctggttcagggatctctaacgccctttgctgctctgggcctcattctgtacatctgggcagacggtgggcagaggcaggtcttttctgcttccttgtcagaatgggtctggcagcaaaggagttgtcctgctgcacatacaatggggagttgactctggtagccaggaggaaacaaatgctctttcttgataatcttgtttctttaatctcatattaagtgtttttctgctgactgagcttcaggtctcttgaatggctcagtattattctacttcagcaaaaaaacttgtacaggttgctagtgtgaacaaggcctccctgccaaacatgcaaatgagagttgctagtgatctggttgcatggctgggtctgcattgagttctggttttgcatgttggattaatttgggtctttgccttatggtcagaagaggtttcagggaacagagtggagttcagggcctgatggaagctggtctctgtgagtcacattggcatcctggctgttcattggaagtggtcccccaacaggtgtttctccattttcacagtgctattccagccacagtgtggaccccacactcagagagacaggtggccctagtggcctttgggggacagggtgaggatggaggtggggattgtagaaattatatcttctggctgctaaaacaaaagtgcagatccctagtaacactatgtcagcatagcagaaaacttctttttaaaggaagttgtctgtagtttgacagacctcagtcaacccttacttagtcagtgttctgttaccagaccatttactaacatttcctgcttttgcaggtttcgatttgacattgtaccgccaccactagcattttgagaaatgtgttaaatgagagatttgcatattaaagtcagatttcctgcttctaggaattctgaattattaccgagcttggagcaggttaacatattcttgtcccatatgtagttgtcatttttcttcttagtttgaactgttttgcttaagcaaaggttgtgaccttggttaaaccacttgaaaacaatttaaccttaatctccagaagcctcaatgcagggttaaattgcaccaaaacaaatgaagattgccctttaagaagtgaaattgttttatttctctcaaggatcctcttaccaacccccagagaggctctctttggattgagttggtcccaacctgccttgacttcctctgtccctgtgactgtggctgtggctttgatgcaggccaaggggagctgccattctctttatgtgcttttcatggtcattattctcaagaagccagaggatgctaagcaaggagctgaaacagcttcatgttccatgaacaatttgtggaactttgcagatgcaggggttggaacagtggggatgcaggagcctggtttgatccacccctcctcctcataccgagtccagggcctgtagccataggtcctgctgggctaaatgatactgctgcagttccagctgtgatgtttttggttccctcagaccttacgcttgagctgcatgttcagggtcagaatgtggtcagtgggcttttcacagcttccaccgcagtgggctgcggggttgaccccgagtggccttggcccgtacctcctgcaggggctgctgcgcaccctctaatggcgtgtctctctgtgtgtgtgtgtgtgtccctgccccacagcgcctgaggcctcgctgtgcccccagcaccgcacaggggccccgctgggtcagagtgaggagctgcagccactgagccagcgccaccccttcctgccgcacctggggctggcctcccgcccaaatggcgactggtcccagccctgcctcacttgtgaccgcgcagcccgaggtgggacggcggtttgcttttttccttactagaaatgctgggcagcttgctgggggtgtgcttgccatgccagtacagccaactctctccctgtctcctctgggcctgggggtttggcctccagcaggcccaggagccctttcttcctctctcctgggagcttgtggcctggtcgtgctccgcttccaggatcacatgtcacttgctagaagttctgtcaaaggtttagcaggggagctgttctttgggtaaggcatggggtgatggcccatgctctccccatgctcccattccctgacaaactggagggggctctgccacctatcaggcccacccatggtggtgggtcagacaacttggcttgttggaccggaaatgtgtgatttaaacctcacaacaccagacaaatataagatcctcagtgatggtcattggaagccattatccttaatgcagtaatgtatgccttgccctgaataaaatgggattttttttttgcttcccaattaactgctgttcttcctgaaatccctgttaccatggaaaacagagagttagctgtactgtcaattctaggtcacggtgtttgaagatacctaattcaatgggtaactaaaaatggggcttctctttctactaattaataatgtatcctgatcagagccttacaactgtagcaggttaaactgaaaacagattttcactgtttcctacaagaaaatgctctcagtctaccattggtcccaagtgggttctctgctacagggaagaaaggtgtctgttctcttctactcttcttacaagaaggggcacgacagagagcttttgtgcgacttccctgataaggtgaccagcctttattcagccctggaaacagttacagttcattcatgcctcattaatattacagcttgtttgacttgggtatttgtgtaataactatatttaactctaggatattttccttcatgtccctgttttcccctaacagtttatacaggattttggcttcttctaaactgacattagaaaacgtaaggaaggccagctctgcactgtaaagaatgtaaatgataaaagcattcgttaaagggtcacccagaggcattggagttacatgcccatttcacccccccagatagtcagaggctgctgttctcagcaggtcccgcggaactctccatggagttccctttttgtttttcccatgttctacccatttggtaactgacaaggtctgttttgagccttggtggccaattttgtgttaccctggccctctagctctcccgctggcaaactggctttcctgggacgtttgcatgttaaatacagcctggcaggcctgcaggctggccatcttcccccactgcggctgtctttggccctgcctctgcaccttcgcctgtgccattccgttctctctgcttggatatcgctcccaccacctgccccctgttcccccaacctggcaagttgcttaaggtatccaccccgtgtggatttatgttgtccttcagccctgataggagttgaagataaaaatgagtatttttttctttgaagatttctcatgccccagatgagttttgagcaaacaagtgttatatggattgcatttcatcctttaactgttgggtgtggcatcctctccacatctcactccctccccgtcagagggtagggggctgtcggagtccagggcaaagattctggccatgtttcttctctgttctttcttgatgcttcacaaagggttgagtataaggtaagtgcttaatctatgcacaccagtggatttgtttggagcacaccttcttggaaatcagcagtgggaaggtcagaatgatgccggccattcagaaaactgtcaggtgagatgcaggctgtgattcaggagagatgtttgtgaggggtgcatttgggactgcagaccccacagaggcagaggaggcagactgctcagaagccctcttcacatgagagcagccacagccgggaaggcctcttgtgtgactggcgataatcatgaggatgtctgaggagagctttctttcatgtgccatatgtcatctcatcctccctgtgcccctccctctctctcacctcccacatagatctgtagatctgaccttggaagtctcttgaattgtccatcttgttccatggcctcaattcagtgccagccttctgaccaatttcctgctgtcattatctcccagtctcacctaccctccatcttcataaaggatgccctggtcctgagtctcagcccctttagatgccaggccctgcagggccatcccagagcctttgacgttgcagacctcagttgcttccaccagctgtgtcccctgccctcagtctgggggtcctcctgttccggcggaagcattccagaccttcccaggcctgctgacgtctgcctgcaggcacagctctgggctttccttttgaagcctggtctacctgccctctgctctgtatttattgagttcccatggggcaccaggcactgagcacagaacagagccccttgccctcgtggagcttatatggtaatgggaaagaaaaacacaatataaattattcagcatgttatgtaatgagcgctctggaaaacagcaaaacaaaaacagtcttgcttgagtgtctttggggaggtaagagagggtggcttgcagtatgaatggatcaaggattgaaggagtgtgagggtgagccttgtggaggttggaaagagccttccaggcagaagggcagctgtgcaaaggccctgaggtgggagtgtgctcagggtgtttgagaaaaggcagccagtgaggtggcgatgagtgacggagcatggccagtatgtgggggtggagcgtggcagaggtgggcctggaggaggtgtggggcagggcctctcaactctgtctggttgggagcattccttgaattcctagtccatccagacgggtccttttgtgtccatgtttagatgttgtgccgatgtcattgctaggagcttttgaaacactttcactgtgcttaccttgcagaccatgcactcagtggcccggtgctgggccttctgggtttatgtcagaaatttctttgactttcactcacagtgagatgggggaagatgagggttaggaggatcccttggggtgtgtatgggcaaggtgggagcagggagccaggtcaggaggccactgtccccatccaggtgggagatggtgggggtctggacctggcagggctgcagaaatctgggcagtagccaggttctgggtatgttttttttttttttttttttttttttttgagacagaatcttgcactgtcacccaggctggagtgcagtggcacgatctccgcttactgcaagctctgcctcccgggttcacgccattctcctgcctcagcctcccaagtagctgggactacaggcgcccgccaccacgcccggctaattttttgtatttttagtagagatgaggtttcatcatgttagccaggatggtcttgatctcctgaccccgtgatccgcccaccttggcctcccaaagtgctgggattacaggtgtgagccaccgcacctggacgattctgggtatgttttaaagatgacctgacagaccttgctagaggactgggcagagtgagaggggagctgaggatgactctgagggctgggagcagagcagctggaggcagagctgccatcatctgagatgagggcggctgtgggtgcagtaggttagtggaggggttgagttcaggacacatcgaagtgtctcctagacacgcaagtggaggtgtcaagaaggtctgagaagtctggagttggggggagaattctgggctgcaggcacactttggaagttgtcagggcatggacagtgcttatagccgtcagctgttcggcctcacctggcgctcatggttttttttttttttttttttgagatggagtctcactctgttggccaggctagagtgtagtggggtgatctgggctcactgcaacctccgcctagctggcttcaagctattcttcctcagccatctgagtagctgggattacaggcacatgtcaccatgcctggctaatttttgtatttttagtagagatgaggtttcatcatgttggccaggtcttgaacccctgacctcaagtgatctgcccagctcggcctcccaaagtgctgggattacaggcgtgagccaccatgcctagcctctggcactcatgtttacttggtggtcttgtaatttcagacacaccagctgccctcccaaggctggctcctcttaaggcttacccgtgttggctgccctcacatgatcctggcatgtagtcagtgctcaggacagttgtgtgtgggcagaagctgcgcagcccaaaggaggaccctcaggcccagggggttgagggatttgcctaagatcacgcagagatggcagctggcctgaactgcaacctggtgggggtgagcagcccacatgttacccgccccccgggctctttccaccatttcctgttctgttctgcagaactggccacagtgtcaaaaggctttggagaaattacagaagttcttggggtagacggaacctacatcaaagggaggcagatggggatgagaaaagcattcctgagtcaaggaatggaaagaaagattgctgctgtcctctcaccaaggacactctaaggccaggggccagatcttctgccttggctggcctctgttgagggtgggtaagggaaggaaggaatgctcagcttggtgttctcagcccccttgctgagtctgcggagccagagctacagctgtcttgatgctccctgagcaagtcccgagttgcctggtaccttgcagttcttggtgggagtttaactgcccagcattcccgttctcaaaaaaaaaaaaaaagaaaaaaaaagaaaaaggaaggcaggcagaatagaaatcttcattgctttctgattcactcaagtgaatcagaaccaacttgggttctgaaaccaaagtaagcagtggtgggctttgtaccaggtgggggctgctgcctgcagccgggtcttcttggctctcctcatggcccctcctgtcttgctgacgccgctggccctggctgtagtatgcttcaagtctgctcccagagaaatgacagggattcctttgggctactggtcctctgggctgagagccccttgtgctgaggctgctcctctcacaccccacccggcaagggtttgccaagtgattactagaaaggatttgagttggcttataaaacacatgcaatgccacaggattcaatagataccagaagaaattggggcaaaaggaaaacagaggtgagaaagaaaagccaggattgtatacagtggctagagatggatccaaatttggtttgatactgtgcagctgggaaggccagagtgtcaagcagcctgcccaggacttcatggagcagtggccgtgatcattgtcctgcggcatcaccccaacagctgctgctgctgtccgccaggccttcgggccatgcctccactctcgagtggcctggcaagaatctaaggggaaacaggatttctcagggagtggaatggcaaggctatccacggttatcagccattcattttttttttttttttttttttttttttgagacggagtctcgctctttcgcccaggctggactgcagtggcgctatcttggctcactgcaagctccgcttcctgggttcacgccgttctcctgcctcagcctcctgagtagctgggactacaggcgcccgccactgcgcccggctaatttttttttgtgttttttgtagagatggggtttcaccgtgttagccatgatggtcttgatctcctgacctcatgatccacccgcctcggcctcccaaagtgctggaattacaggcgtgagccatcgcgcccggcctcattcttaaacccaatggggacttggtagaatttgaaagctttcttgtgcgctgtttcatgagtatgtccaggaagtccccaggcacagtgggccctcagaggactctctacggaagctgtcttcataacaagggaacctcaggggtgaaccagagttgtcatggcctcagccctgcttgcccagctctgggaatagagctgaagcatgcgcacacacagacacatgtgcacttacaccagacatgtacacacaaaggagagtgttttggtaagaaggaggcatctgaaaagggagtcctacatgggtctacttttgaaaactcaaagatgtgggaaaatatattgttaaaaaaaagaaaagccaaacccagccagcgtgtcagaagtgcttctgaggtggaccttggaaggatcctgggccagctgaggtctcctgagagtgtgggaggtgacagagctccaaggtgcagggctgagtgatgctgccaggaactaggagggcagcagggcccgcccggggctgagaggtggttggtggccaccagccaggtatttcctagtgtcaggccagggatagctacctgtggggagtgtgtctagccctcagggcccttccattgggttttggggatggaccaggaatttggtgggagatgagactcatttggcatcttgttttggtggaacaaatgtgttctgtaagtcaggggagccctgcatcttcggctggcagtcagtcccaggggcagaggcacagcagggctgtcagcgttagcttactctagagagagttaatctcttcaggtggaaaattgagtcatggaggaagctgatcagtaacatgaacacaccctcagaggcagcagatttattgacacatctatccaagtatcaggtataaaagatgctcgttcttgccacaagggcttgggttttaagtgggatttgaatgtgattcgtgaatggctgggctgctaaagtcagacagttgcccaacacaaccagaaggcatctggatcacctctcctgggcctttgccttctcttaggaggagtccatttgcttctcacagttgtctagaaggtaggcagggcagatgaggttaataaggaaactgacatgaacttgctcccctaaatcctctcatttgtaagtgaagaagctagaattagaactgggattttgaagaactctggttctctttcctctacttgacagtttttgaaattgctttaaaattttttctgcaaaataggcaaatacggtgtacacctattacaattttaaaattatatggttcatcttatataatgcttttttctgtattattatttttttctttttaagatgggattggctgggcagggtggctcacgcctgtaatcccagcatgttgggaggttgagacgggcagatcacctgaggccaggagttcgaggccagcttggccaatatggtgaaacccatctctactaaaaatacaaaaaaattagccggtcatggtggtgggcacctgtaatcccagctactcaggaggcagaggtgggagattcgcttgaacctgagaggcagaggttgcagtgagccgagatcactccagcctgggtgacaagagcgaaactccatctcaaaaaaaaaaaaaaaaaaagacagggtcttgctctgttgctcaggctggagtgcagtggtgtgattgtggctcactgcagcctctacctccctgggctcaagtgatgctctcaccttaacctcctgggttgctgagactacaggtgcatgccaccatacccagctttttttttttttttttttttttttactttctgtattttgtagaggtggggttttgccacgttgcccaggctgatctggaactcctgggctcaagctatcctctggcctcggcctctcaaagtgttgagattacaggcatgcaggcacaagccaccacactcagccaggaatacctaattaaaccattatttaattgggccccagatcttaaggagctcctctgattgtcagaatatgggattgttctcagaattgaaacagtgctatcaaggctgggcgcggtggctcatgcctataatcccagcactttgggaggccgaggctggtggatcacttgaggtcaggagtttgagaccagcctgaccaacatggtgaaacccctgtctctaccaaaaatacaaaaaattagtcgggtgtggtggtggatgcttgtaatcccagctacccaggaagctgaggcaggagattgcttgaagcttgggaggcagaggttgcagtgagctgagatcgcaccactgtactccagcctgggcaacagagcaagactctgtctttaaaaaaaaaaaaaagaaacagtgctatcaaaattgctgattgggaggccggctgcagtggcccatgcctgtaatcctagcacttcgagaggctgaagcaggtgaattgcttgagcttaggagtttgagaccagcctggacaacacaacaaaaccccatcgctacaaaaaaaaaaaaaattaaccaggcatggtggtgtgcacctgtagtcccagctactttgtggggctgaggtgggaggaatcgcctgagctcaggaagtccaggctgcagtgaaccaagattgtgccactgcattctagcctgggtgacaaagcgagaccctttctcaaaagaaaaaaaatattggggattgggttattgattaaatgattgacattggcgtgtgccatagaaaatggatcaatacaatatttacctgttttttaaggatcctttgtagtataggtaaacaaactattgtttataaactgtcaataagtgtagaaggtttctcgatgctttaaggttgagtttagcaacagtatgatacatagttgttagtttttgtttagtgatacaaggcagttcctcattttgacagttgccttttcttttttccctaaatcactagctctcaagcttttaaatctcccaaaatgtcccaaatcctgggccacacctttgccacacttctcaaatgagaatctctgggagggccccaggtactgcggtggcactgacagcattgtactgggggctgctggttccctgtcagatgttttaagtcagattggctagcatagtcacagctgctgacggtgtctttattcatggatgctcagtacagcagttgctagtttcaaatagacaacttccaggaggcattaaaaaaaaattatatgactagaaacaggagggaaggcatgcagatagatttgtcttcccatgggaagtaggccatataagttaaatctctctctgtatcatatccttttttactatcttcagagtctttttcactacctgaaattctcttatttgctttgttttgtctccctgcactaaaacaagctgttagagcaggagccccgttcatgccccgtgctgtatccctagtgtctttagcacaacacctgaaccaggaaaggtgctcagaacatacttcatgcatgagtgctaaataagcctctcttctcctctctcctcacctgagggcaggagttcgagactagccttgccaacgcagtgaaaccccatctctattaaaaatacacacacacacacacacacacacacgcgcgtgcgcgcaaaatagccaggtgtagtggtgcatgcctgtagtcccagctacctgggaggctgaggcaggagaatcactttaacccaggaagtggaggttgcagtgagccgagatcgtgccattagactccagcctgggtgacaagagtgaaactccctctcagaaaaaaaagaaaagaaaagaaaaaatacatttgaagtcaattccagaaatataggaatgccttatatatttgtgtggtttctcgatgctttaaggttgagtttagcaacagtatgattcatagttgttgtttttgtttagtgatacaaggcagttcctcattttgacagttgccttttttccctaaatcactagctctcaagcttttaaatctcccaaaatgtcccaaatcctgggccacacctctcccacacctctcaaattagaatctctgggagggccccaggtgccgcggtggcactgacagcagtgtgctgggggctgctggttccctgtcaggctttaatcagttgaagggctcttcctcccctctcccctcaactcatggcccgtagcagtgtctttttacagagttacaggcagctaggcaacactccaacttggagcagcttggaaattgatattacacatcaaattagtctcctcctgctgactgctaatggaaagcttagtccagcttagtccagcttgcagtgggataaccagagctcctcccgcaagtccactctgcgacctgcttctccaagtacagtgagggcatgaagtcattcattctatttttttttttttaaactgggacagagtctcaccccgtcacccaggctggagtgcagtggcgtgatctcggctcactacaacctctgcctcccaggttcaagcaattctcatgtctcagcctcccgagtagctgggactacaggtgcgtgccaccacgcccagctaatttttgtatttttagtagagatggggtttcatcatgttgaccaggctggtcttgaactcctgacctcaggtgatccacccacctctgcctcccaaagtgctgggattacagacgtgagccactgcgcctggctcctgctagatttttggtacaaatgtaataatgtatgtccattcatgataattgggaaaatgcaaaaaaaatagaaatagaaaaagaagaaaaaaatccttcaatcttaactataatatgcaaagacaactgttattcacatgttggtgtatttatttttatttttatttatttgttttgagacagtgtcttgctgttgcccaggctggagcattgtggcacaatcatggcccatgcagcctcgaactcctaggttcaaacgatccttctacctcagccttgcctagtagctggaagtacaggcgcacaccaccacacgcagccgaatttttaatttttagtagagacgaggtcttcctatgttggccaggctgatctggaactcctggcctcaagcaatcctcctgctgtggcctcgcaaagtgctggggttacgggactgagccatcatgcctggccacgtgttggtgtagttccttctggactttttcccaagcattttctttttcacactgtgaacgcaactttgcattcctgctttttgtcttgtgacattgaaacagaagcattttctgtggttcctacacaccctgtaaacattttaacagttgtacatagtattcctctgggtgaagatccctaagtcatccttgccctgacgttggactgtcagtcactcctcatcttcacactgaacagcctacagattttagtgacagggccctggctgcatagactgaccactggcagtcgggatctaccaagttgtgcagttttgttgtagccatctgtctgtgggcaaagcatgcaggttcttaatctggagaggaactgaaggccagggcaagacccacatccccaaaagtgctgacagatctgaatcataggtctgaaaacaaagcagatctaacattttatattatgcagatagtataacagtattatggacatgtcattcacaaccgtgtgacattttcaaaacatattttccaaaaagttggttcatgtgctcactttctgcactcatgtgtgtgagggccagccctaagctttcaggggcttgcagctggtagctgagaccttgtttttggtgggccccatttaagagaggcagacataccgacaccgtgtggtgctgggtgtgggggaaggtggtgttcaggcaggcagtgcagagtggctgtaaactatggagctgctgtagcccttcacttgtcatcatcccagtttgcgagggagcatgaggccaagggcaagccactggggggcctaaactaggagggcaggagcagtgaccttggtgcacttggccacagagggtgcccatgagaaataggacaattatgcagtttgatttttttgaaaaaatctaactctatgcattttccatgttgctagatacttagttatatttatttatcgattcatttatgtattttgttttgttttgtttttttgagacagagtctcactctgtcacccagtggcacgatctcggctcactgcagccctgcctcctgggttcaagcgattcttttgccccagcctcccgagtagctgggagtacaggtgcacgccaccatgcccagctaatttttgtatttttagtagagatggggtttcaccatattggccagactggtcttgaactcctgacctcgtgatctgccctcctcggcctcccaaagtgctgggattacaggcgtgagccaccacgcccagcctcatttatgtatttttaatttatttttatttatctttttgagacacagtcttgctctgttgtccaggctggagtgcaatggcacgatttctgctcactgcaacctccgccccccaggttcaagtgattctcctgcctcagcctgctgagtagttgggattataggtgtgtgccaccatgcccaattaattttttgtatttttagtagagatggggttttgccattttggctaggctggtctcaaactcctgacctcatgtgatcctgcccacctcaaggtcagcttcccaaagtgttggaattataggcgtgagccacggcacccggcctatttatgttttttttagagctggggtctcgctatatcactcaggctggctggagcggtgttgtgattctacctcactgtatcttcaaactcctgggcacaagggatcttcccatctcagcctcttgagtagcttgggactacagacacccgctaccgagcccagcaacacttagttttaaaggttaaacctttggcagcttacttaatttaacttggagaagttgtaacttgtaaaatggacgtaaccatagtgcttctctcccgggttattgtgtacgttacatatgctaataatgtatgcacttcacataccagcttgcacacaagaaatgctccagaagtggccctgtcactgttaattcttatgatcagacttgtttcagattttcaccagtgtaaataatgctgtggtaaacttctttgaacagaaagcttgtttttttctttttttaaggattctttggattatttcttcaatgtggaattcccagaagtgagattagtgggaaaagtgtatgaacattctgtttcttgaagcatgacaaatgttttccaaacagactgtttccaaacaaatgctttccccccagcagtgaaggagagtgctcaattgggagcccctgagcccacagcaggtgctataattttgtaatcgattatttccaattgaatagatgaaaattactatcagaatactaattttaaaaatgagtttcctgtttataagtattactctaagaaattgttgcaggcatttaacttctttgaagtttatgattgaattaaaaaagagataaatgattatctttgttgaagtgcccgctcacctcagctggcactgcctgggcttcagaacccctcctcccaccctggcttacgcctggagagctgcgggtggctcagggtgaggctgcaggtcctcttttccttactgctggtccccagccatgatgagacccctgccccagcactctacctagagaatgacaggctgtagctttgttactttcactatggacagaagcagcaggaagctcagggactcctgaggtaaatgacagtgagaaaaagctgcttagtgttttggctaagtccttcctttcccacccaacaagctggtgctcttactgtaggagagagtttaataacagcccgaagagaatggcacaacttgcttttttctgactgaggatgggatttgactcatgcagacaaatgaatggactgccttttgtctctgctttaccctcctgcctctttcaccagccctgcattggggccataacgtggtcattgttggggctctcccttttttcacctggtatttcagcttcctcctctgtaaactgaggcagcggtaccagtgttgcagaggggtagtggagaagttagagccattatttgttttcaccagaaactaaacttgaccattatctgatgggtgtttgagcacctactttgtgccagaagtaaagctgacgtggcccctgctttccgcccacttgggcagatggccggctggaagcagttgaacggattagaacatgcagctacaggtgatcagggctgcagcctaggtgccacctagctgccccatggttccgtggtgggcaggtctatgcaaatctacccccaatgtccggagaagcggaggggccaaggaaggaggctgacaaatccagtttcttagaaagaaacagggacttaggagcagaagccatgtttctctcaggaagtggtgagacaaggtgtcagatcccacgccattagcccccagagccagggcttatatgccatagggaaggagtggttcagaaagaatgtgtaggatatttgaagtatgataacattaaggtagtttgacctaaagataggatttaaggtaagtatgtgctcttacataaaaacaataaactgtaaatctttttttttttttttttttggagacagagtcgctcttgttgcccaagctggagtgcagtggtgcaatctcggctcactgcagcctccgcctcctgggttcaggcgattctcctgcctcagcctcccaagtagctgggattacaggcgcctgtcaccacgcctggctaattttgtatttttagtagagacggggtttctccatgttggtcaggctggtctcgaactcctgacctcaggtgatccatccgccttggcctcccaaagtgctgggattacaggcatgagccaccggcacccggcaaactgtcaatcttggaggccttcctggaactgggattaatcagaagccagcatggtgaattagcctccaagatggagctgctttggcctccacatccaccaagtgctccctgtgcgccaaggccagctccaggtatcaaggtgttaagtaacaaaacggatggaccccctgccctgtggagctcccagtctgatgagagactggcctgataacacagccaggggaggcgcagtgagaaggtggccttagagctgatacttagggatgaggatgcggttctccttcccattcgaggaccacgagcagcatacacagtgtgagggagcagcgggcaagcaaaggctcgaggcaggaaggagcctgcgtggcaggtgctgggggaggatgggaagcgagcagggcccagtgttacttggctagctgctgtgtcaccccagtctctgcctccatggtcccatggcagtctcccctggtgtgtctgtgtttctatctcttctaaggacactagttctattgactctagggcccatcttgctccagtatgacctcatcttcactaattatatcttcactaattacatctgcagctaccctgtttacaaataaggtcatgttcttcatcctactttacgggggacccagttctgcccataacccctggtcagaagaaggcactgtaagtgctgagtccacaccatgtggcagcatgacacactagctgattcaggaaccaggtgtcatacataggatcccaattaaatgtgtccagactctggccacttctcatccccttcatagctacttttctggcccaagttccctagaccagtcaagtggcatcactgccccacttaagactctccaaagcacctctgacggcttctgaacccccaccactctttggtcatgtgcccttgggtgcctctgctgacactagcctcagagcctgtcccctgctctcagaacagaagtgcccctgcccttttgccgttccttccagggctctgtgccatcgcctcctgtcagagcatagctgagcaagctctcctcttccccaccctgccctgccctgtccctcctttttagatttgtttatggtctctccttactagaacacaagctcatgggaacagggactttcctcaggcctagaggaggccctgcttggtgtgggtgtgcgcatgtaactgactgagggtgcaaagcccctttagggtgctaggagcaagcgtggggcataggtcctgagtcttggctctgagttctcatcctgcccctgggcggctgtgagccgcagccatttaccctctctgggccccggtgtcctcatcagtgggaagggttggtaatgaagagccagaccttcagggtcagactccacctgccccagctgggtggccttgggacagtcactgcacccctaggcctcagcctggactgtaagtggggcagcacccccttatggatggagggttcctcgagagacagtgttgcacaggcagtgggtgattttcacatcgcttcttgttcgttccccacaacaaccctgggagacggtttcccgtccccattctgcagatgagaaaacaggcactgagaaggtaatcacctaggccaggggtccccaacctccgggccacagacccaaagcttcatctgtatttatagccgctccccatcacttgcattactgtctgagctccacctcctgtcaaatcagcagtggcattagattctcataggagcgcaaaccttattgtgaactgcacatgtgagggatctaggttgtatgctccttatgagaatctaatgcctgatggtcagtgtttcccatcacccccagatggaactgtgtagttgcaaggaaacaagctcagggctcccactgattctatattatggtgagttgtagaattatttcattctatattacaatgtaataataatagaaataaagtgcacaataaatgtaatgtgcttgaatcatcctgaaaccatccccgaccccacccctggccgtggaaaaattgtcttccactaaaccagtgtctggtgccagaaaggttggggacagctgacctaggccaaggtcatgcattaagaagtggcagagcccagatctgagcccaggcatggacttgagggcccgtgctctcgtctgccacactgggctgctctctcaggctgatgacactcggcctggggtcaggcccaggtgggagaagcacatagggcagggaggaagagttccctctgggcgagtgtcagagacggaagcgcactacaggcatccacacacagagtgtgcgttcagtcgctttcctgggtggaagcacaagaaaatgtgaacagctgtttcctctggggagagcagtggggcaggatgagaggagtagctctcacttccttttatgctgaaatatttaagaataagttgtgggtatcctcacattactcccctaaatgcttcagtacacatctcttcctggagagtcacacagccactgtcacacacacagtcacacacctcacaaaatgggaaattagcagcatcatctcacgctgaggtcatggtcacatttttcaagttgtctgaaagtgtcttgctgctgatcagcctaatgtgagtccaccccaggaccccaggctgagtctggccatcctgtccctgcagtctgtgtcatggcagcacgttctccatttctccgggccagccttccttcgggatgtctgtccctggcctggatctgtctgctgcctctcaccatgctcagcctggccctcaccctgagcttcctgagaaccggaatcacggctagagtctggattctgtgcacatcagcgttttgctgggactgtcatagatgggggtatgacgtcacctgacaggcagccctcccaccaccgatagtgccagcgttggccacagcacaaaataactttgtggtttgtccctgtgttgtaaagtcacatccaccttgtggctggacagtgatctggctgtggtcatgcttcattgcatttttcattatacacctttttgtcttttgcatcacatatatatatatgttcctgttaaatattacctggtgtagtccgggtggggtggctcacgcctgtaatcccagcagtttgggaggccgaggcaggcagatcacgaggttaggagttcaagaccagcctggccaacatagtgaaatcccgtctctcctaaaaatacaaaaattagctggatgtggtggtgcgtgcctgtagtcccagctactcaggaggctgaggcaggagaatcgcttgaactcgggaggtggaggttgaagtgatctgagaccactccattgcactccagtctaggtgacagagtgagactccgtctcaaaaaataaataaataaataacctggtgtaatctgaacttaacttttttataatttgcctcgttagactaaaagcagccttcccagcatctccctgcgaggaggtaaagtaagggccttggaggctctcctgtgttgagaagtggcaggaacgtcctcagtagccaaggtcattgctgattcaggaagtggcccctggaaccacaggatgatgtcaccacattgaggaagcgtttcactgctgttcagtaacaaggaaggaacttagctgaactagagaactggccactggacagtggacgctgaccctgtgctcagtgctggctccctagcccctccctcgaagtaggtcagcccagcagaaagcaaccccaggcctgttcctcggaggcctgggaagggccacgctttctgtgtgtgacgtggagggtggggtgtctgaaggagcttagccctcaggtggtctggtccccatggatggaggaaagagcaccagctcaggacagggctggaatccacagggaagagccaactgcatcccagcactcctgaccccttggtaggtcagttgtttacctcctcccacaggccccactgtcttcatttcactgatgtgggagcagaagctcaaagaggtcaggctatcacatggactcccactgcttgtcagcggtggggacaagatttgtccgtccagtgctctttccactatctggtcttcccttggctgacatgcacagggtgtgagaggtggtagcagtgcttgggcccacatggggtcttctcacgcccccaaggcctggcaacctttcattttttctgagttgtcagacatgcctgtgtacccagcattgccacaccaggcccagggacataggaaaaccaggacctcaccctgccttctccacagggtctgtgacgctcacgtaccagtgcagtcatgctgcccactgcacagagccatttgatggtagaatcctgtcccatgtgctgtaaaatgtaaaaatatactttggttttttttttttttttttttttttgagacagtcttgctctgttgcccaggctggagtgcagtggtatgatcttggctcgctgcaacctccacctgcttagttcaagtgattttcatgcctcagcctcctgggtagctgggactacaggcacgtgccaccacacccagctaaattttgtatgtttagtagagacagggttttgccctcgttggccaggctgatctcgaactcctggcctcaagtgatccacccccttcggtctcccaaagtgctgtgacatcattacaagcatgagccaccatgcctagcctacatttgtgttttttgtacttgccactttctttctgtttgacctatccatgcagattagaggaggctttttaatcagcactatgtgactggcagatgctgcttccatactttctaggaaaattgcaaaatgtagctgataagaatcaatttcctgtttttctaccaactcgattgccttctttcacagttacctgaaagtggcccactgaagcatctttattaaaaaatctttcaccctttgttttaggagcgcatttgggaaagggtgtctctcccccagcacagagtacaggcacccaggctctgccgggcagtccctggagcagacagggtggactcgagtgggagagacccttgtctgcctgagttgggagagttttcttggtcttctttttagattgtattttgagggaaatgttgggcttttctagccttcctactcagcctctcccccttaggctttttctcagctggtgtgacagactggaaaggatagaaataaggcctacctgtggttacagttcttgaccacagcaagtgaagacttggagctcttccagtggggttcataatgcaaaaggccgccttcctgggagaaggtccgtgcatttgatgcgactttagtgatgagcttaaactaacaattcccgttcttccttccagtgagtgtctgggaaagcaacctgcaacaatgagagagtggcacatcccccagcacttgctttttcccttggtccctgtgagctctgaaccttcagatcctcagagcagagccaaggccaggctcaggtggtcagaagggcccattcaggcctgtctcacaacgacgtctgtgttcactgtcatgtgcatgggcacaagaggccctttgtggagctgagttgctgtcaccaaggcaagaatatctctgctggaatcctccctcgaagctcagtcccgttgtgtgtagctcagctgatgttcaatggttggtggccaagaattctgccatctgcagaactgaaagctgtacatccgtttatgaaaaccacaacattcaggggaatacccattgtctttaatttctacattgatgtgacgagctatgatgtggtgagccagtatgtgccagctgtgcgttattctaacagtgtcagttatggtagacgtaaacatgtacatttgcatttgaagctattctggccttgcagatgtgctagaaagctcagaggacaaaggaggcctcacttctccagcaggtccagttcagagccccgtgcccactctccccctccaacctggctgtatcaggcactgtagctgtgcaactcagtaccagcttccctgccaggatggggcttgttttccagagcactttttttggggtggggtgggatatgagccttctacttgattcatttgtggtttccatttggtagtaaatgaaggatgtcgtaagtgcaatatttgctttatagcaagggttttgtgaaccaagcctcagagattccttatcaggaaagaggctgggaacaggtggctggagtggttaatgatttgggtgtgagtgccctgttcacttgagaagagtccccaggaactgtctggcttcctttattctcttccatgtggatggtgacatctttttgaacataggaaagcccaaacttgagagttctgattggcataggtgaagtttaggaacaaaacgaacaaaaaaatatactttttgttttggtgtattattaagaaatcaagttgttaaggtggattgaggacttttctttaccctctagctttatttctgaagagatactttgggaaatataattgagtgataacactaggatgggatttgacttgattttatttagaaaaatacatttatgtttttatagctgcaactttcttttttttttggagatggagtctcgctctgtcacccaggctggagtgcagtggcgcgatctcagctcactgcaagctctgcctcttgggttcatgccattttcctacctcagcctcctgagtagctgggattatgggtgcccaccaccatgcccggctaatttattttgtatttttagtagagatgaggtttcatcatgttagctaggatggtctcaatctcctgacctcgtagctagaatggtctcgatctcctgacctcgtgatctgcctgcctcggcatcccgaagtgctgggattacaggcgtgagccactgtgcccggcccgttccaaagtaaatttattgctatatgttttgtgtgtttttaagaatttcatgacagggtgatgcctctgcttggcaacctcacatggtagagaagttcccagtctcctgcccggccccacctcagccctctgcccagaagcagcctctttctacctcccctggttcttctgtggatcccgtctgtggcctgaattgcatttaggcctcttcccctgttttattcaccatagccatggcccagctatctgaaagcctcctttgtcaggaattattcctaaccttttagtttctctcaaagaggaaaaccctaagaagcaaatttagattggaaagtaaggcagaagcaacacctaggtgaatgaatcctgctagttaggtttcctaaaatagatgtaatgaaagaaggaagtaaactaatacacaattagaacatttatttattttttgagatgcagtcttgctcttttgcccaggctggagtgcagtagcttgatcttggctcactgcaacctctgccttctgtgttcaagcaattctcctgcctcagcctcccaagtagttgggattactggcgcccgccaccacacccagctaatttttgtgtttttagtagagaccgggttttaccattttggccaggcttgtctagaactcctggcctcaggtgatccgcccgtctcagcctcccaaagtgctaggattacaggcataagccgccatgcccggcacaattagaacattttaaaatgacccgttaaccatgaaattgaattctgtagttgtccatctgtcgacctgtgcatgcacctgtctgtgcatgcatgtaagcctccacccaacaggtgtttgtcagccaggggtgagtgctacaagggagaggtgcagaggtgcagagtctgacacagcatcaggatggaggggaaggaccaggtccgggaagccgagctctgactacaaaagaggaggtgggtgcgctgagggaacagcctgcacggagacccgggaggaggacagggcaaggaaccatctaaagcagtagctccaaatctctcagagggcaggtcttgttctgagagttttagagaagctatggacccttcctgaaacgggggcagaggtgggcacatacttctaaaactacaataatttctaaaagcatttagattccctgatcgtgaaacatcctgatggctgtgtaagccccagcacccagcaccatggtttatgttgtgaatgttaagactcccgtggggtttgttacatcagctaggagttcacatctcattcattcaataaaaactgtctttccaggagctgcttagaagtatttaaactagctaagtgcacagcaaaagtgtctgcatttttatctgcatttctttctaatcagtgtacaaagctgcttacagaacgaaaatgtttggggtcactgcagaaatgggcgggcttcattttccatgatctcgtagtaacactacgagagacaaaggtcaactctttttttttttttttttttgagacggagtctcgctctgtcactaggctggagtgcagtggcgagatcttggctcactgcaacctccatatcccgggtctctaagtgattctcctgctagctgggattataggcacacgccaccatgcccagctaatttttgtatttttagtagagatggcgtttcaccatgttggccaggatggtctcgatctcttgaccttgtgatccgcccgcctcggcctcccaaagtgtgaggattataggcgtgagccaccgcgcctggcctcaaaagtcagctcttgaatgttggtgtgcctggagtggagtctttggtctccagatgccctccacctgtttgaaggatgctctttggttcatctgttcaagagctatactttgggtctttgagttagttccttttttggagcactgcagatctgccgtgaagactgaggttctgatccttgtgaggcctgatggctggggcttgcatacccaaaggcatcttctcttggttggtaccaggggacttctgtagttgggaaagctacgtttgactgtcacttgattttaacattcaaatatttgtaagcctttcctttcctctgcctgcattgttgggctactgctggaccttgcgggtttgagatgggaatggaatgtggtctgcccaggaaactgctgtgcaggagctgtatcagccttgtcttttgcatatgatgacttggtcttccccaacagccacctccccgcgagtgtcctccgagctggagcaagcccggccccagactagtggagaagaggagcttcagctgcagctggcacttgccatgagcagagaagtggctgagcaggtcagtgccccaggcaggtctgcactgcattgactgcccatgctcagggtggagtgtggctcactgggaagaagatggcagacacagccctgtcttcaaaacatttcagatatgcttgctgagatggcatttcatgctgccgtaagtgtgtattcttgtcacccagtgtccctcccagtcagggagggatcccatgcaaagttacatttaggaaagattttctaggaagtcattgccaaggaaagaaaccagttaaaaatgcttcccagaaacacttgtgcagacacgtgtctgggctttccctgagtgagctgagcctgcacaggctctttgaagggtggcatgcagggtgggcgcagggatgcaggcctgaggggcaggagccagcccagcccccgccaagcactttgacctgtagcaagagatttgcaaaaaacaaaggctgggaaaaaatgctcccgaaatgagagtgcttgtgttttgatgatggaagtatgtatagttttagtttttttcagttcccatttttcttttcttttctcttttcttttctttctctctttctccttctttcttttttttttttttttttttttttgaatcagagtctcactctgtcacccaggctggagtgcagtggtgcaatcttggctccctgagacctccgcgtcctgggttcaagtgattctcgtgcctcagcgtcccgagtagctgggatttcaggcgcgtgccaccatgcccggctaatttttgtatttttagtagagacagggtttcaccatgttggtcgggctggtctcaaacttctgacctcaagtgatctgcccacctcggcctcccaaagtgctgagagtacagtcttgggccaccgtgcctggcccccatttttctttagtaagcatgcattactttacaacagcgagaagggaaaggagcaattagagtggccttacaaattgtcaagcctttggttgcagttatcagggctgtctccaatgacctttggttaaaaaaggtagatgggaccaggggcagcacagggattcctctcctctattagaagttggtgttcagagaggaatactggggatagttagatttgagtactgacaagttcatcccggcattgtttgtgtgtctataactggcaacattctaaagctcagtgacagtgggcaatctcagttgtggcctctctgtccctgcagtgggaaacaggccaccagtaactgcccaggtggatgcatgtggcttcatggccagcagcccaggaagaaggtgcgtggtagcatccactgagaaacatagggacagacggacggtttgagcccattttagttaatatttataataaaatataagggagcaagttcaaactcccgtgctgatcagtagtggcattgtccctgtgaatagctactgtgtagcagcctgggtaataccatgagaccctatctcttaaaaacaagaaaagaaaaaatacaaggaatatattatttatatttaattattatattatataaaagcttaggacaaccctgtcttttgcatatggtgactttgccttaaataaagatagtgaatcatttctgttaggaatcatagaaatatgcagccattttccggaagcatacacagtggaggtggaatgatacgtgatttttatcttctttctaattcctttttgggttgtcagatttgtgttttataaggacacacattgcttctataagtagaatttataaagccagtttcattttgagaaaaaaatattttagattaagcattccctttccccagtttggtggtacctgagccatagtctccctggtgtgaccccacaggggtccaagtcacaggagtcgccatgagggaggggccttctgggtacacacacatttgggatttgaaagtaattgtgttttacaagtagttttgaaatcttcctttgaaatactgcatcatacaatgtgcatttcctgtttctggccagtgtggctttgttctgtacagtgatgttattacaattaccagtttgcattgtccctctacaggaagaacgcctcaggcggggtgatgacctcagattacagatggccctggaagaaagccgaagggacacagttaaaattccaaaaaagaaagaggtaagagcttgctgggagggtagatgtttcaccctgtcctgtagttgttgcctcaatatccccccaccaacttgcctggatggcgtgatgcacagtgagttctccaacctcagcaaataaccttcatgcctgtagtgagcgagagccaggtgagcaagcgactgaaaacacacctgaactaaccaggagacacttaatgtcccagtgcctcagtctgctcgtttgtaaaatggaggtgatgatagtgcctgcctcctgccgctgtggctacggcagctgtcaagtgagctacatgccaggggctgcggaacgctttcctgcagcagggtgtgcccccagaagtgctggttgcctcttcagccctgtgccaggcttcctgctgtgatgtagagatgaccaggacatggctgggctcttgacaagctcatcatcatccagtcaagacccagaccccttctacaccacaggccccggggctccattggcctcctctgttacagtgctactgaggccggtggagcccctggctcctgactggttgatgttgatgatccctgatgacacatggggtggtcttgagagtggggagcatgcaggtgcccgaggaggagggccctcaggctggccctggatggtggctggcaggtgggagggatggcgttctggaggaggtccacagcctgggcagaagccagtgttagcctggaaaagtctgttgagccctgaggtctctgaagtctggtgagggggtttagcaaacagtaaatagcttgttgtgactggagagctggctggacggggagggagatgggacggctcagtttccaagttcttctcagcccctcctagagggcttcactggaggaagaggcacaggtgggtgatatttatggctagttcatgagtatttgctgtaactgtagcatagtaaaacctgtccccttctctttgtcttaaaagcatggctctctcccacagcagactacgctgttggatttaatggatgctctccccagctcgggccccgcggcccagaaagcagagccctggggcccgtcagcctccactaaccagaccaacccctggggcgggccagcggctcctgcgagtacttcagacccctggccatcgtttggtaaagaccccattactggtctcccgtgcttgcctgctggatgggtgaggggcagggcagtgcttcttgctgtctctcacccacttgggtctggtcgattgtggtgggtgtccaggctcctccagccctcagcagtgatatccaactggcccttgccctcctccttgaggatggtggcatggtgttccctctttgttttgagtggttttctgctttgggagaaggaaagtcaacctcccctcaacctcccatttgcatcagaaatggcttgtgccttctctgggacatgtttcaactcttgcagcctcagcgttacacccagcgtcccagctgaaggaaccaaaatacacagcatggaacatccaaatcaagctgctgtaattagatggaaattatgatgtgcttaccaccactgctgatgaaaaggggatacatttgctataattctgcttgttacttaaagcaatagaaaatccgtttaataggctaaatgaatattttaaagttttgcttaatgtgagatgtaagaggaattgtggtgggaagttcaaaatgtgagcatgacacaactggtttgatttgggtgatgatcttgggcccacgagtttcttaatcactgggcaggagcatggcccagcaggctttatgaaggcttcctggcctggtgccctgggaggcccctcctggtgtgctaaaccctactgggcgtggctgacctgtgggctgtttgggaactttgtatatcttgtggcatcttgcctgtatctcctggagtctctgtttctctcagaaccgtctcttgtgtttaactcggttccctagatgtttgctaaaatgtaccaagtgacaggctgtgttctgctgtgcatgacccctgagacaacaggtgattattgtccctgttgtctgttgtcaaggccctgctcaggagcgggcagggcaggaacacagcgtaatagcagtactgtgtagtccaggactcgatggaggttatttgagagcatcctgggatgagatgagactcagtacaggagtccaggagtgtgaggtaagcattttggaggaaggccacttccgttgagtccccagggaaaagaaggtgtccaggcaccaagaggcagggagttccctgcagaagactcagcgtgtgagaagcagaggggtacggagtggtggagtgggtgcagatgcaaccagctggtgtgaactgggaagcaggggagaagggcccagatcactcagggcctgcactcagccttaccaagtgcttggacttggtccagaagacactgtcagcccccgatgccctttagcatctggtgagttccaatagcttgatggtggcctctgtaacccaggcagggccttataccccctttggcaggagccctctgggccttgggaaaagccccaggcaaaattgcccacagctttcattgactgaaggccagttccagggctgctcaagaggttggttcacaaggtttgtcacttgtgtgtggtacccccagggagcctgtggtatggttttactcaccacacatggggactgtggtgccccagggctggcagacccttttagacagtggctttggctttatttttaaatctgaagaatgattagtctgtaaagtgatggccaccataagttatggttaggatgttttcaggaaagactgttcattaaactgtcggatagttgtcttagtgccctgtaaagaaagtggtcacaccaggagccaggtgggtttaatagagttaaattctggggagggaattggggatcagagtggtgggaaggagacttagttttaacactttacctttttatattgtttggcttgtttaccaggggtaagtttttcccagtcaggagagacaaaaatctcaaaatatctttaaatgaccaagttatgcccagcccctcctttggctggtgaacagggctgtgccctggacccagtgttctgggccgagccaaggacctgacctgaccctctaggaacatagcgtaatagcaataccatgttgagagcaccctggggtgagactcggtacaggagtccagggggtgtgagcggaggagtctcccctgatgaatgggggcaacttggtgggcttgatgggctgctgcttcacctaggaatgctgcccatgtgaatctgccctcccaaattttaagaacttgagataaaattcaccatttcaacttttttttttcttttttttgagacagtctcactattgcccaggctggagtgcagtggcaccatcttagctcattgcaaccttcgcctcccaggttcaagcaattctcctgcttcatcctcctgagtagctgggattacaggcttgtgccaccacaccaactagttttttatttttagtagagacggggtttcaccatgttggctgggctggtctcaaactcctgaccttaagtgatccgcttgcctcggcctcccaaagtgttgggattacaggcatgaggcaccgctcctggcccatttcaaccattttaaagcggacacttcactggttttcagcacattcacaatgttgtgcagccaccatcagatatctaattccagaacatttccatcaccccagaaagaaaccgcatacccaggccctggcaaccagtatgtgctttctatctccagggatttgcctctctggacatttcatagaaacggagtcatgcactgtgtggacttttgtgcctggcttattttgtttagcatcatgttttcaaggttcatcaatgttatagcgtgtgtcagtccttcatgactttctgtggatgaataatattccattgcatggatatacaacacttcgtttaaccattcagcaattgatggatatttgggctgttttcacattttggctattatgaatccagttttttaaagagaagatagaaacctggatttttgaaatctagtgtttaaatgttggctgtgaattttaaaaattaagaatatggtttgagctaattaaaagctatctgaggatgggcacatgtggcttgttgactgccagttggccatctcttgccacttgcccagcctaggaccttcttggttctgatgcacttggcattattaccagtgacttggggaggagataggccaccaaagcccatagacattgttaataggtttgggacaggctcagtgcttatggcaccatgtcctgtagttgtcacaccatcctggactgctgcaaggcccttctgtggccctggcatgtcctggaaaagtcaccacaaattccaatatggagagatagccactgttaaaatgttagcttgtctgcttcctgtcttttttctgggcattatgtttttactcagttgaagctatattgtatatataattacgtgtgtatgtatgtgtatatttcaatttgtagtgtcatgagcatttctaggcatcattagaaattctaaacaataccacgctgtaccatcatttactaagcagcctagtgatgttcataggggtgtttttgcagttctggcactctgctttcaatagaaaaatacattaaaatcacagtgatttcttttaattctgagattcttttctcagtggtggtgttgaccagctctgcaggagaatggccctctgctagctcctgcattcactgaagcgtgttagcacaccctctgcttccacattccatcagcgtagcctcagagcaagagtgtggtattggatttattgtttagcatctagttaaatccaatagtgcaaattttcagggtcacccctccatcctgagactcattcataaattagaaagattggagtcccttcccctaacagtgttagctgtgccctctggatgaaagaaacactgttttgaaagccaccatttgtagtgagccccatcattaccagttttttccaagcagcactaggagcaacttggccaagtggccttgggaggaaatgctcagggttgaaaggagggagattggagcctgccaggtcagtggggcgcttcctcctctgttccagacacacaaagcagccacctggtctgaggagggcttatagcctgctgattcagaagaccttggctggctggagccctctctctgtactcccgcccactgcctgggctgggacagaggctgtcttccgccctggcagcagcaggtggtgctactggcttcttggtgacctctgcacggctcagttcttctgtgacgcaccacccccccgcgttgtgactgcctccctgtgcacatgaatattcatctgtgaggctcgggatgagccaggctggcgggtgggaggcgaccgggacacaggctccctgtgaatgggccccacagaggaagaggccggaaactgcttgatctttcaaaccttggttccatcttcgtttcctctcattcacttgagctttcaacaagcatttattgattgggtatgtggcatggcctggaccctgccgaggacgtggagagggagagcacagagagaagccttgcagcggatctactgtccattcatagaggaggagcatgcccattgcctccccgagccagcaggcgttccctgagggtacagctggccctcagggaatgattgtgactttgtgactttgtctccaagtcacatttcaagaaagcaaggtgccacagtgtgtgaccttccatgactcccccgcacacagcaaagaaggaggtcacactggccacgggactttgtatgtgtctggggggctttgcccatttgtatagtctgaattcagcccagcagtttgcagtgtcctatacacatgggtccccagtgtcacttgcagaatgcaaactagacagagcccacccacgccaaacagcttgtccatgattacctgggtgatttggaggtggtcaggatttgattcaagcacagacttcactctatgttcaaagctgtctgggctgtgaccaactttgtctgtgtgggctataagagtagggggttcttggctggacatggtggctgacgcctgtaatcccagcattttgggaggctgaggtgggcggatcacgaggtcaagagatcgagaccatccttggccaacatggtgaaaccccatctctactgaaaatacaaaaactagccaggcgtagtggtgggcacttgtaatcccagctacttgggaggctgaggcagggagaatcgcttgaacccgggaggcggaggttgcagtgagccgagatcatgccactgcactccagcgtgggcaacagagcgagactccatctcaaaaaaaaaaaaaaaaaagagtagggggttctttctgagccaaaacttgtagtttcaacattgtgcatgatacagttgcagagttttaaaattcttagcagtgctgttgtttgttattttaatagcagattctaaaggggaagcagggcccataagagctaactggaggtgtcagaagagtctctggaatagtttcaggtggcattccactggagtgtggggttctcacgtggaagcctggcccatgagtcctggatggtgggtcagcgtgctgctggctcatggagagtgcttcagaacccgtgcagtggagatactgcacatattgcagagttcatggtagaaagaattcttccggaaatgttggctgggcatggtgtctcacgtctgtaatcacagcactttaggaggccaagtttggcagatcacatgaggccaagagttcgagaccagcctggccaacatggtgaaaccccgtctctactaaaaatacaaaaaattagccaggtgtggtggtgtgtgcctgtaatcccagctacttgggaacctgaggcatgagaatcgcttgaacccgggaggcagagattgcagtgagccaagaccatgccactgcactccagcctgggcaacagtgagaccctgtctcaaaaaaaaaaaatttccagaaatgttaaaatgccttgtgttaactcttaaagatataaacctattagtttaaactgtgtttagaacctcactgtctgagagtacgtctagatggaaggacagattctactttttaaattttttttttgagatggagtctcgttttgtcacccaggctggagtgcagtggcgcaatctcggctcactgcaacctctgccttccaggttcaagcaattctcctgactcagcctcagcctcccaagtagctgagattacaggcgagtgccactacgcccagctaatttttttgtatttttagtagagacggggtttcaccatattggccaggctgttcttgaactcttgacctcatgatccacctgccttggcctgccaaagtgctaggattacaggcgtgagccacctcgcctggccccttttttttttattttttatttttatttttttttgagagaaggtttccctctgttgcccaggctggaatgcagtggtatgatctgggctcactgcaacctccgcctcccaggttcaagcagttctcctgcctcagcctcccaagtagctgggactgcaggcatctgccaccacacccagctaatttttgtatttttattagagacagggtttcaccatagtgaccaggctggtctccaactcctgaccttgatccacccgcctcggcctccccaagtgttgggattacaggcgtgagcagcgttgggattacaccatgcccagcgacagattatacttttgcagggagcctgggtgtgcagcggctgaggccagaaaggcgaagcctgagggacctggggctcggagcagagctcagagactcctctctggtgagggcctctgcaggggctcaggcatcctggattcccttaaatgcctaatctttatattgtgtctcattgtctgcctggcaaactcttatgtatttttgaaatcatggctcagacatccctactcaggggatgtggtcaccccgtcctcaggcctgcctcttgccctcttgccattgatggctgcctgtgacccgcatgctggctgtagtggctgtctgtttctctatctcagagggaggggccatcctggggccaggcctggggactgctgaccaaatgttgcttggatagaacaaggtgaccgtgggagaccagagcttgtctccaccacgcatctgcccactcaggcttgtaagtctgagctgggtgctcacatggggcctcatttttgaggagggcttggtgagaggtctgggtgcacccagagctcagtgtttcttatgcatcctgtctgcccatttgagtcatctcagtagcttctaaaaatccaaatgctcaggcccaccccagaatctgtgtgtatgcagaggacagcatcagtattttactaaaatccctaagagcttcccaagaagaaccatggttgagaaccactagtctggtgccccctggcccagggtgcatgaataccactcagtctaagacacttgaaagctccatgtcttagataatcaggatggagattatgggccactctaatctggttgtgtttctgagcccctgaattggacatttatccagaacctgttagaagtggtcactgaactccagtgtgcagagatgcagataaactgcaaagtccctgccagcctgaggtcctgtgggtcccttgatccttgtgacctctcttcaatccctagttagtgatggagcacaccctctgtgtgtcaggcttggatctcggggatgggcagcaaagcagacccagccgatgttctcatggagcacatgctttggcaagggggacagatgcagtctcacatgcacacaagcggcatgagtgccctgagaagggttttgagctgggtttagagtgggaactgcatggcgggctggcatagaggctgcagagtgggggctgggccttcccagcaagtgccccacatacagtatgtcaggggagccagtttgttcgagatgtgatgctgccctcagcttgacccagtggctaggaggtgaccaccaacactcagaccccctttgctgtgttgttcacctcagaagctcaaccctttgctctggcacgcacagtggctgcctctggtgcccacctcatagtcccagttaacacagcccagggaatagagagagtggatttctctgtagctccagtaccatttctgggatttagggatgggggactggagttggggacactttgcagattgactttaaccagtgagaacccttttctgttgccagggcaggatctgtcccttttgagactgactggaagtgggtgaggggagaattcttccaaggagaaccagggcatccttgcaggagaaagcaggagtgggggatagaagtaaccggggcatgtcccctgacagaggcaagtgggaagggatagtagctggggagtgagatattgtgcaggggagatgatgcatggtcagggctgcagggaaagcgaggctccagtctgttatccaggcacagctgggctgctgagcatgggcagtgaggaaggcatgttgactcccccaggctccacagggggccagaatcagcctggcacttggccccaggtctcccgtgtcctctgtgttgtgtcaccgcagtcctgaagtcacaccacagctcttcggcttgcagtcagctctctccctgatttgtcatttccaccatgccacttacgtccagctgggacagagagctgaggacccacaaggtgtcctgttgcagggggttagagtgagggcttgtctctacagtgtgattccagcagggggcagatttttgtttactgatagccccttccccatgtcgagcagaggtggacctggcaagggcagcttcagtcctgggggaggacgatctgcatgagacactggaagacgaggagtgaagtgtcagaagaagcttctggatggaaacagttatttctggagcctctagaaggttgtgggttctggggcagtagcaggagaagccctgagtccaaacaggagtggacaggccatgaggaaacgaaaggcacaagtatccatgggatgttgggaacaaagcttgcagattgacatctgctttggcctggccaggcccccatcgccggggcaagcttgggaaggagtgaaggcagcactctcctcctctccctcctagtgctgctacagctagccagtagctgatcccggccaaaagtgaaaaaggccaccaagatagtggctggtgggccaggtgcagtgtctccttgcgcctggccaataatatatttttacgtaagaatttgtgggacaactgaaacctgtgagaccagcctgggcaacatagggagaccccatctttacaaaaaataaaaaaatcagccagcatgggggtgtgtgcctgtggtcccagctacttgggaggcagaagtgggaggatcccttgagcctaggaggttgaaactgcagtgagctgtgattgcaccactgcgctccagcctaggtgacagagcaagaacctgtctctaaaaaaaaaaaaaaaaaaaggtagtggctggtgtggcttaataggcccttactaaagctattcagcatttcagagacgagaaggcatgaagctacatgtaggatgcctagcagttggttcatctttttgaaagccaaggagtctcctcttcacctgtccatccttgagcagcagagctggggcttttaagagaagcatttgtagaattcagagtaggaatgagggaagagactagttgtctcggaggctcaggggagcattccctggtcttctgagattgacacatcactgccaccttctgctgcctttctctaggcctcagagctcagccaggctgtcacaagcttgctgggtgccaccctaatgtctggtgccagggctgaaggtagccctcactccagggagtttacagtgcatgagagactcatagttaaataatagttatggtgctgtatgataagtgatctaaaagtcaagggggggattccagaggagtcagagaaggcaggaagagaaaataagagggccggagaggcccagaagatgccaggcatttgggaagcagttgggaatcagtgtggctgggggtaaacacgggagcagagtgaggacacctaacacatatctgtttggagtttcagaagagctaatatttgaaagctgacagggttttccagaattttggaaagatgctccttctcagatccaggaagcctggtgaatcctaagcaagataaatcaaagaaatccccacctggacatatcatcaggaaactgcagaacaccagaggaagaaaataccttaaataaacctacagagaacaggccattcattacaaagaaatggcaactaaatggatagctaacttattgacagcaacagtagatgtctgagtggcatagagtcttcagtgtgctgcaagaaaaacacagtcaactagaaagccattgctagcaaaatcatctttcttccaagaattgataatttttttaaaaaagatattttaaatttggaaacaacaacagcaacaaaaactgccaacccccagaattctgtattcagtgaaagtgttcttgaagagtaaagttgaaaggatgacatctgttaataaaacactaagagaatttgttgccagcacatctgtaccacagaaatgttaagagaagttcttcaggctgataggagggaaaaccagatggaaactcagatcttcaggacagaatgaagagcatcggaaatgggaaataatttgggagaacatttcagaagtaataaggatataagaaaatttgagcggcacaatccataagcttatgaatttgttgttcccagcaattggagaatacacattctttgcagtcacatgcagaatacttggaaaaaattgatgatgtcctagacagaaaagctagtctcaacaaattgcaaaaaattggtatcacatataacacaatttctgatcacagtacacttatgtaaaaaatcagttaaaaggataagtagaaaaccttcatacacctaaaattttaagaacacttctaaattcttgagtcacagaaaaaattataatgaaaatcagatatatttagaaccaaattaaatatatatttagacggagttttgttcttgttgcccaggctggagtgcgatggcgtgatctcagctcactgtaacctctgcctcccgggttcaagcaattctcctgcctcagtctcccgagtagctgggactacgggcatgtgctaccacgcccagctaattttgtatttttagtagagatgaggtttctcaatgttgatcaggctggtctcaagctcccgacctcaggtgatccacccacctcggcctcccagagagctgggattacaggcatgagccactgcgcctggccaatagtatatttttacataagaatttgtgggacaactgaagcaatagtaaaataaatttatagctctaaatgttcacattagtaaaaaagatataatgaagttagaatagcattacactgacgtaaaataaaaggaaattataaggataaagatagaaattaatgaaaagaacataaacacataatagtatccgtaaagacaagtcagtaattgaaaagagtaatagacaaatttctggcaagaaatttttttaagaggaagggcacaaacagcattaggaatgaaacagcataactgccggcacactcaggatttcatgtcgggtgagaggctgactctttgatcagctctgtgcttacaaatccaaaaacttagataaaatggataaaattaaaaaggaaacagcaaagctaactgaagaataataaaaaacctataaatagaaatctgtaatcatggaaggtatggaatcggtatttaaaaatcctccccttctgcaaatccacccagagggctttgctagtaagtactaacaatattcaagaaacaatcccactttcatacaaactcctttagagaacaggaaaataaagaatattcctagtcattgtatgagactagcagaagcctaatggcaacaccagacaagggcagtgcagtgagaacaaacatttcaggccagtctggttatgaatatagatgtaaaaatcctaaggaaagaaacaattacaaaacccaagccagggaaatattttcaaagatgtacattatgaagtactttgtttgcaagaaccaactcattagaaaatttacaaatgtaccatattaacagattaaaacagaaaacatgtggtcatcttagaggcagaaaccatttgataaaattcattagccatttatttccaaattctagcaaacttggaataatggcaaacttccataacctgataaagggcttctaaaaggaaaaaagcctatagctaacattgaacttaatggtaaaatattaaaaattgatcctgtaacatcaagagcaagacaaggataccaactaccagcacttctatttgatgatgtaactggtgatcctagccaatgcagtaagacaagaaaaagacaaagtataaaggactagaaagaagacactaaatagtcatcatttgcaggtgatgggattgtacatagaacatgaaaaaatttctacagataagttattagaattaagaattatttgaattattattagaatcaataattggaatgacttctaattaacagtttggcaagattgctgggtacaaaagagtatacaaaagtttttctgcataacaataaatagatttctatgaaaagtttaaaagatactagttcctagaaataatgcttagttcctaggaataaatcttacaaaagttgtacaaatatctgtgggagataaagggtaaaaattaaaaagattaaatttgaccaaaagatattaaaacttaagcaaatgcagagataccatgtgatcttggtttggaaaactcactattgtaatgataatgcttctccccaaattgatcttggatgcaatgcaattctggccaaaatcccaaaaatatttaatttttgtttcttcacttttgttttttaacttgacaagatgattttgagatgactacagaagagcagagggccaagaatagccaaaacaagattgtgatttgctgtatcagatatcaagaattctcataacactgtttgtgaggataattaagaaggtgcaagtggccaggcgtggtggctcacgcctgtaatcccagcactttgggaggccaaggcgggcagatcacaaggtcaggagatcgagaccatcctggctaacacggtgaaaccccgtctctcctaaaaaatacaaaaaataagctgggtgtggtggtgggtgcctgtagtcccagctactcgggaggctgaggcaggagaatggcatgaatctgggaggtggagcttgcagttagcgatgattgcgccactgcactccagcctgggtgacagagcgagactccgtctcaaaaaaaaaaaaaaaaaaaagtgcaaggacggaaataggtaaatgtagagagcccagtaataagcccacaaagacttgacttacgacagaggaggccctgcataccatgctgcgaggagtggatggactctagtccatgctgctgggatgagtcaagaagaaggtaaccataagggacgatcggtaaaagactcaaattggcaccttataggagaggaatcatgagtgacccatgagtatatgaaaagatgcacagcctcattaaagaacagggaaatgcacatcaaaaccacaatcaaataacttttcagcccaccagattggcacacatgggaaagtaagctaatactaagcatcagagaggttatgaggcaactcctggggcggcaagactggcacccactgctggatggaacataaactcgtgccaccatgtggaaatagttgtagcattccttggtgaaggcagaggtacccatgacccagcaactcgtgtatacatgtgaacaagaacaagcagcaaaaccaaacgagtatccttcaacagaggaatcatgacttttttttcatagaatggaacaaaacaaattccagctccacctcaacacagatgactctctcaaataaaatgtggagtgaacaaagccagccacaaaggaatgtgtacagaatgcttctattcatataaagttcggaaaatagggacttggcatggtggctcacacctgtattcctagcactttgggagactgaggcaggaggattgcttgagcccaggagtttgagaccagactgggcaacacggtgagaccccatctcgacgaaaattagaaaaaaaattagccgggcgtggtgacattcctgtagtcccagctacttgggaggcggcggtgggaggatcgcttgagcatgggaggtggaggcgtagtgagctgtgattgcaccactgcactccagtctgggtgacagagtgagaccctatctgataaataaatgaatacacacacatatttagacacacatacatatacataatatatatgtgtgtgtgtattcagaaaataggcacaactaactaaaggtatccctacaagataaactagaaggagaaacaagagaaaggctaataaacagttcataatggttggggtaggaatgtcattggggaggcactttctggtccctgagaggcggcagtggtgtctgaacacttgcagtgctccgcgagaaggaaggagatgttggttttattttatatgtactcatgtatacacaaatctgtgtctatacataaagatgcacatcacagcgttgacacttaacattagatgcactcagatgttttagtttttttgtgtgtgttttttctttttttaaaaatttttttctctgttttttaaagccagttgtgacccactaaattgattttgtcactccctgtttgaaagtgttttattgcttaagttgggtggtaagtatgtagctgtttgttttattcctttttatacaggactcatccatttatatatgcttctgtcagaaagcagaaaccactcaaagcacatggggagaggatgcctctgtgcctctacagagcctgggccgaggtgggagggctgcctggggccccttgtctgaggagggagcctggattctgtggggagataggtttgtttcagatagtccatcgaagtggggttgagctcaggagccctttgcaagccccctgtatggtggggagcttggagagaacctctttcagctgcttcctctggtcattactagaggacagggagaggttatcctgggacatcctggcctagcatgcttccttaccagggttgttggccctgggccccagctgtgtccctctttgctggcgtgggacagtacccttttgatggctgtctcacctggcacagggcatagaccctggtgtggctggcagtatccttttcccttctcaccccagctgcccagaccctctgaaggcatttctgagccctgaccctgccttccaacaggtaccaagccagctgcctccattgacccatggggggtgcccactggagccaccgtacaatctgtccccaagaactcggacccctgggcagcttcacagcagcctgcctccagtgctgggaaaagagcttctgacgcgtggggcgcagtctccaccaccaagcccgtgtctgtctctggtgagcccctcactcacccactttcctgcctggcctctgagcgcccacgggccctgcagccgctcctggctcctaggcatcagccctgttgctttgcttgcatttgctcccctcctcccccttagcctttgttcctgatccccagatcccaggtgccccagtgtgagagtgagtgagtgcgagttcccaggctttgtgcgctggtacctccctccaaattgagggggcttccacctgggtgttgagagagaagactgccctgggcccacagcctgtgggtcctgtcctcacccctggggggctgggcaggctggcctccaggcactccttctggtgacttcctacagaccctcatccaagcaaccagacccagcttgatgcacctccaccactgccagcacccctttgccttttggggtgagggtgttagaagcagtagcaggtgggcatcccacaccctgtcctgggaggccaggctccctgtctcccctcccagcgtgctggtgaccccaggctgtcttgcctctttggctctcagaattctcctccatgaggtagggtaagcggggagaggcccctgttgccagcccatcctgagggtgtgcactgggcagtggagttgccatgaagtcctgtgagatgcccccagtcattggcttctgtgtccacccagggtcctttgagctcttcagtaatctgaatggtacaattaaagatgacttttctgaatttgacaaccttcggacttcaaaaaaaacaggtatgtacaggtgatgatggtttccataatcctccgtgcatttgaccagctgagttattgcagaaataataatcagctttcaaaacccttcagcttcctgcattttctttgtattttgatcttgggagcctgaagtttctaattctaagaattcatacatcaatagttaaaaatcacaaggtagagtcccccaggactatgtctccaggttaggatccccaaagcttcctgcagattccacagccccggcctcctcagctcagagtgggcctcacctctggcctgatccagcatttccattcaccctcctcctgccaatttccactcctcagagggcctccttttcccagacaaccacctttgggcatcagtggggccagcctctgccctgtgttgtcacctcccaggtgaccgctccagcccagcagacccacagtccagtctccagacctgttttccttccctgtgtgcctctgggatggaaggatatcaggtggatgcagtgggccaagtggccagtgggccaaggtgggcctggaggggtggagggagaaggcctgggatgcattcttcacacaccctgtttggactggggtgtgacagcctctgtccatctctgggccacatctcccagccacacatggcaacttctctctttttttctttcctgtcttggcttctgctgcttgcctcccccaatttccctaccacctctatcccagtctcttctttttctcccttctcttttatccctccctaccaactgtagccacaagcctggctaggccctggtgtgaggtacaagcagcctggcaccgttgaccctgctcgacccccttgacctcctctaacccctctcagttcaagagctcccagctgagagaccagaggcagctttgagaatgtgctgcttttttgggtctttcctttgctgcattaataagattccatgtgtcttctctgtaggccaaagtatagcctaacctgtccttgactcctgctccgtgcctcagtgagaaggcagcgtggccattgttacatgtcagcttttgaaacatttatcccctgccggtgcagtggctcacacctgcaatcccagcactttgagagggccagcgtgggaggattgcttaagcccaggagtttcagaccagcctaggcaacatagtgagacccccgtctctacaaaaaaattaaaaaattagccagatgtggtcgtgtgcacctgcctgtggtcccagctagtcaagaggctaaggcgggaggatcccttgagcccaggagattgagactgcagtgagccttgatcgatcgcccaggctggagtgcactggtgttattggtgttttgtttttttgttttgttttgttttgagtcttttttgctcagctcatattgtcagatagagttgtcctgccccttgcctcaacttttgtggattaacagattgaaaacatcttctcatgactttaaaacttgttaaaaaatactttgttgctatataatctctctttatatggctcagcaacaattcaataatttgggggaggacattttaggttgatttcaggttttgctactgtaaatgatgctgttgtgaaactctttgtgcttataaccttgttcacattttacattatttgcttagaccagattcctagaaatggggttactaagtgagagaatgactgttgttaagaattcctgtaccgtgaagcatcccgtcgtggcaatcacattcctaccggcctggctcagcacagcctgtgttgcctctatgggctgaattttaaaagacacaatttgctttctttttactatcaagaagttcatgtttattgtggaaaatttagtaaatggaaaatgtaagaaaaaaaaaaaaaagtaaattgcccatgcctagcttccaacccaaaatgacatcttggtattctggaggaatgagctatacacactcttttataacctgctttagtattttgataaagctttctttgcttatcattaggtattcttctgttcctgcatgctggtgtttcgttatgtggacacttgatttatctaacccagcccatgactggctgtgtgtcgtcacgtggcgctgtcaggcaggcatgtccccaggaggccatgttttgtgttaagtacacagtcttaggctctccctgccacactcaccctgccatatgtgtccttgtcttgtagccgaatctgtgacctctctgccatcccaaaacaatggaactaccagccctgacccctttgagtctcaacccctgactgtcgcctcaagcaagcccagcagtgcccggaaaacacctgagtccttcctgggccccaacgcggccctggtgaacctggactcactggtgaccaggcctgccccaccagcccagtccctcaaccctttcctggcaccaggtaggctctcatcccaggcttcatccattgcctgctgtgcctgggaatgggtgtgcagcaggcctcttgggggctcttcccactgtgtgacggggaaggggtgggactagctggaatctctagatgattacgtatgccctcgccagtgctgcatggggtggggtgtggaagccgttgtcagttatgtggggagtgtatgggtaggaaatagctcctctcctctcagttgagactaccaagcagaaactgtccctgacttggtgcccccccagttgtgagaccctcgagggaatgtcagttctaagacaggtggagtagggtgggctgctgggggtgaggaagagccagggtttggcgtgtagcattcctctctcgggaaaaatgtaacttagcccttgggtacaagccttcctccaggtcccttgcttccactcctggtgccagagtctgccccctgccctcagggctcaatgttggctgccggccaagcccccagctgttcaattgggtatccagggccattatggcctggtcccaccctcctcttcccttcctgtgtgcatgaaacccttgtgacatccagccccttggcgcccctcagcctgtagagcccttccttaagcccaggctgttacacactcagtttcccctgcctggaatgtcctccctcctcttccctaatgaaagcatcttcctcatcctttgacacctagctcagatgactcccttctaggaagtccacccagcccccttcctcacggggtttccccaaagccttgggcttcccccagggcaggaatgtgtcaccctcaggtgttcagccccaggctggccccaccatgtagggatctgaggatcttgggccaccgtccctgacagtaccttgcagaggagaattaccactgaacttacagaggctgaggttggggacccttgggcagaggtgaggtgtgtggagttactgggtcctggccaaccctgaggtcctgagatgggtgaggacatggctgcccccaggggaggtggttccctgggtggaactagattagtttccagcctcctcagccagccaggagtctgtgtctgccccaggaggccttatgcctcttctgcccagagagcccttgaaggccctgcaggagctccagtggtcatctgtgtctgtcagctcttggtgggcacctggctggaggcctgaggcagctttgttggctgcacaccagtcatggttcctgggggctgcagccaagatggaggaggtttgggcaactctgctggacatacagggccattctccaggccacacagggtagggccaggctgcatgggagagttggtgccagcagcgcacacacttttgcaaagaaaaggctttctggtatgaggtaaattctggagacactgggaaagacaaagctgcatcaacttcttgactgcaggatttctagccttcgcggtgtcatatgtggatccctgggtgcattgtgggcactgccacatgagccacacactgccagtcccatgtccctttcagcaaacaaaatgagggagcagtggtagctgatggctggtgaaggtgtcctgggtgccagcactgcagaggagccagggtgccccgagatgggtgtgttcctggcatggccttgttcagctttgtgacgctggacaaatcacttggcttctcacagcctcaatctcctcatccttaaagtgcagattcatgcagtcagcagatatttgctagtgtctgccatggactcggccggcactgtcacgggctctgagggcacagcagggaccagaacacccgcatgcagtccctgacctgggagctcagaaagccacaccctgacggctcagcctctgcccctccttctgtctccccaggtgctcccgccacctcggcccctgttaaccctttccaggtgaaccagccccagccgctgacactgaaccagcttcgggggagcccagtcctggggaccagcacatcctttgggcctggcccaggagtggagtccatggctgtggcctcgatgacctccgcggccccacagccagctctgggggccactggttcctctctgacaccactgggccctgcaatgatgaacatggtgggcagtgtgggtatacccccatcagcagcccaggccactggcacaaccaaccctttccttctctagtgcctgggcctgggacccacccagagcacctgtgctggaggatgccgagcagggactctcgtctgtgggacgggatccaagagtttggggattaggggtattagggcttttcagctccagcttcctgatgaaagggctgtctttacagccccaaccctcagaccctcgccttccaaggcaggcccctcagcctggcctgctctcaccacctcctccaaagcactgaggtcctggcagggctcctctgaggccttggacgaggacgtggagtcatcagtgttgcccttgcccctaacctcagcccgagggtctccaggatgttgcctggcccaggacttgggacagtggccttgtctttgtcctccccaccccccagccctagggacaccccaggcagtcctgggtgtggacacgatgaagcaccggctccataagacaccttttggggaagtggttgtgcatattttatttttctttgactcgtgtgagttcaaagtaaacaccaccaccgtggacaactcttgaattaaatccactagagcgagctttaaaactaatctgagcataacccccaacgtggctctatgcttgtgtacctttgcacatattttgtttagtacagtttcatatttgagtttgcagaattatctaatagtctttttttggctaatatttttataacgtggttcttatttaactgtctagttttgatagaatttaccaggtctggctgaatgaagatgttggcacgtgtcattttagtggtttaaatcctcttatttatggttttaactctaagaaaattttaaaaggaagagatgtttggatgacaaaaaaatgccttattgaaaaactaaagcaaattctttataggaagaaaatatgggaatttgattacacatagatgatgatgtttatttaaaaaaaaaacaacagcaacaaaaaatcctagcctccagttgccttttcctttctttagctcctgtttttggtgaattactaaactgattgactttcagcctttttggctagatcctgagaggctatttttcttacgaatataccaacatcctgaaagttaaagaaaaaaatctaatgtatgaatgtgactcaccaatttttatcaactaattccttttttttattaaaggcatgcagggattaacaggacttctgtttacaatggaaatctgaaatggaagaaacatctttaaccttgtgtgtctgtgatctcctctgtcttaatccacgctcaggctaaagatggggataatgtggaaatggcagttgtcccgagggcgtggggtggggggtgcttctgtgcccacgggtccctgggcaacagtccctaggctaagacaggggtggggggctaagggaccagggctggccctgatccacctacctgctaactccagatattatttttaagttggagacctaaaaataattctcttgtattttggagatgaagaaaaaagtcattcacctgggagggatttttaacaaacatgcactaatattacctccctcttccaaactcctactgtcctcacctcacccaccactgtaaaagtattacgtcgtgcattaaagaccagaaaagacttgcttttacccagggaggggacattcccccaatcctgtgtctgggcagcttgcctggtggatgtttctggccctttttccaccatgggaatttctcacctctagctctaagggcagctgaccacctgccagcccctctctggttccagaagattacccttcgcaccggcacaggagagatcttaaatggtctctgggctgctgggacatgcaggctctgagtggggactgcacccactcatgctgttcctgaggccgccctctccagtcccaggagccgtgtctagagttcctgaccagccaccttctgccagaactgcaggcctgcggctgggtcttaggctcccgctgccatttgggtaagccggtggctggtctcgtctgccgggggaagggtggggaggtgcaatgggatgggaggcaggatgcttgcccagaaaggtgctttccttcagacggtgcagggcctgggccagccttacaggtcagtagactagactcgactacttggggtcagtgattcttttgtaacgagtctttcatgatgtgactttgaggccccaacatgacagccactgggccaccgggacccaagaagacagccccctgccccatcttctggcacaggccatcccgagtgcatgtccctgttgcccactgcactgatcatgaagccaccggccactgccacgcatgttgcacctgtgccatcgtgctccctcctgatgggcaccgtggtggaggaagtcacccagctgtttctcagtcccagaggccggtggctggttttgaacttgtgttgactgttgatacttatttactgtataaatataatttatcatttgtaccatgatgcggtttctggctgtgtccttctcccaccccatcttcatcagtcctgtgccactggagaggtgggagatgagggagccgattcttgtggagcttggtctgcagttattgaggccaccagcctggtcctagtgcccgcgtgagctgggcatttggttgcccctgaacctcagggaaagggggtgggaggcgtgccttttgtgaggtgctgagactggtggcctgcacgggtgtgctgggggaagtgctagccactgccctttacccttctgtgtccgccctcttaatgcggccttgtcactggtggaggctgctttggatgaggtggaagtgacagtgtgccgggtccccagaggcttcctgtgctctgcctcctcttgtgtccatgctgcagaagagctgctctgggaagccactgcctgtcagctgaggcaacagagggagggagtgcgtggagctgcccagccaactgcgtgttcctgagaggaagggcctgttggagccactggttcttaggtggcttgctgtgcaacagctgaccgacagagggcctgtgcctcagagccaccaaccagacgagggcagcggcgggaggacacgtgcatctccaggcagcagaggtggaagaggtgctctggtcacgggaagaggcaaggccgaggcagaggcggctgggagaccctgatgggaagggttggagaggccttgagacgagcctggagggaggtctgggactgccctgcagccctctgctctctgtgcaagtgcctggctcctggtgtccacccaaggataagcagacaagcttgactcagagctaggaggctagggactggtggcagggggtgcccgttcagtgcaggggacaggagagaaagaagggtgtgtgggatgctcttggttacgctgcagtaacacatctccaggtctcagcggcttcccgcggaagtttctcacagaagtcagtgactcagggactcaagccgctttcatcttgaaacactgctatctttgacagacagccctgaaggtggctatgaagggaaaaatggacaagggtcaagcatagatttcttacagccaggcctggaattgcctcactgccactcacaccagtgccagaattaggccctcggcccccatccagatgtggggtgggtggggatgggcaagtgcaggcttccttagtggtggagggtgggaggtggggaaatgggcttggttaacattgccagtctctatcacagcggactgtctggctcccagagagttatttcagtcttcttctcaaacatagacagtaaggtcctgtgtcctgggctctgtggagtacagagccttctccagcaaggcagacacagcctataaactagaaagacctatgatctgtgcccttcccccaacaataacaacaaagcagggcaggggtcagtacccacagtccagctccatttggaggagcagagaatgggagactgccccacagtgctggaagctgccgcacagactgaggtcgccttgcggtgaggagggaaaggacctgatggtgccctgctctgggctctgccccctggtggggagctggccttttttgtattcccttggctgcagctcttgggccaagctcagctttctcacctgctgcctgtgggtggatggttccaggccaggacctgttttgagtgagccagaggcttcagtccaggctcatggactttgcacacttccatcaaaaatgtggcaatctttgtacttctaatcagttccatgtacaaataactgcattattttggtcagagtgttactttggtggcccctgatggaccttgtctcccagtgtggtctccgtcacctgatgggcgtggccatatgactagatggggccagtgccatgatggcaggaggggcttgataaatgcctgcacatggagcttgacctcttggcatgttctgctggcagcccacatgtcgtactatgagaacttcaaacacatggagaggccacatgggggagaacggaggtgttctgtcagtagcccccatgagccccagacaacagcccaccatgtgagtaatcatcttggtcagctcagtggaatagctctagccagaatcaagtgtagcatagccacccagctgagcccagtcccctgtaggatcatgagtgataaatgatagtggttttaagtgacaaagttttggggtaatttgttacacagcaatggacaactcaagcacacacataaaattctttcctagacataagctgccttatttccttgctgccttacctccatgcttctctcaatttaatggtagctaccatgaggccatctgggatcatgatgggagagccacccccttaattccgtatttaccaaaagaccaagttattttgttcagatgagaagttttattatgcctttattgctgaaagcaattttgaatcttaccttttctcattagagtttgagaaagtcttttgcaaccttttgatgctaattttttttagattgttgcctttcatttctgcttgcaaactagccagttctttcctccttactgtgatagcattccaaaatgcagtcaacagtagccaactcacactgcacatcctatctggcctgtccctttcccctagagctgctgtctctggggcacataacctgcctcccaagttagcatgagagtcttagcaaatgtcttgtacttgcataatatagatctcctgctgtccagcttatgagctgtattctttttgcctgccacgcagctgcttagccaacaagagtttgttttttctgttttttggctacagcagaaacccactcctgattttcatatcatttgcaatagaataggctatgcaggatcaaataaccccaagctctcattggctgagcacagtatcttatgagtgtttctcactcacaaaaagcctaatggagatgttcctggcagtgctctgcaagctggggtgcccagactcaggctcctcccttatgatgctgctttcttcaatgtgtgcctcaaagggtgccatggacaagaacgagaagtgcttgtgtgaccctgaagtgggtcagacctctcagtggtgaagatccttttcatactttgctttggctagaactacccaaatggacccaccttgatacaaggggcctaggaaatgtagtcttctggtgtgccaggagaaaagggagataggctggtcaacatgcagctttgtgacaccgacagcatggacagcaagtaagcgtggacctgcaggccgtatgcctcgactgtcctcatggagggggtcccacatgcccaacccccccccccccccggcttcccgggcactcgcgccttcagcctcttaaatctcactgcatcatctcttaccttgactgggcagggatgcaaggagctttgtgaagtgacagtgacatttctgtgcctttggggctgggttgtgcattcttttttgagatggagtctccctctgtcgccccggctggagtgcagtggcacagtcttggctcactgcaacctccacctcccgggttcaagcgattctcctgcctcagcctcccgagtagctgggattacaggcgcccgccaccatgcctggctaactttttgtatttttagtagagacggggtttcaccatgttggccaggctggtcttaacagtcctgacctcaggtgatccgcctgcatcagcctcccaaagtgctgggattacaggcgtcagcaccatgtccggcctggttgtgcattcttaaagtattcttggccaggcgcagtggctcatgcctgtaatcccaacactttgggaagctggtgcaggcggatcacctgcggtccggagtgcaagaccagcctggccaacatggtgaaaccctgaaaccctgtctctactaaaaatacaaaaattagccagcttcagtggcaggtgcctgtaattttaagctactcgggaggctgaggcaggagaatcacttgaacccgggaggcagaggttgcagtcagccaggaccgtgccactgcattccagcctgggcgacagagtaagaccctgtctcaaaaaaaaaaaaaaaaaaaaaaagagttacgcattttgttgtacgtaaatgtcccctcaaaagaacacactaaagccagacactggattctggttaatggtaagtgtgctgaaatatacagaaggtggagtcctgatttcacagtttattttgaaatgcaataaaaataggatggattgaagcagggatgaatagttggatatatgtgaatatacaagtacggaacaggaaattggtaatggtaaaatctaggtggtgggtatgtggtgttcactgtaaaatgatgtcaacttttccacatttagacatttcagtaatgttgagaaaaattggaaaattaaacataaccagaagagggtgacttagtatttcccagctgctgacaggctggacaaatggggcctgaggcttgtacgtgcacaccacaggctagaggcttcagggaagcttcaggtccccttgatgtggaccaaggccagtgccctgggtgaggtgaggccatggacagagaagacagctttccggggagctgtgatagctgtgataaaatggggcagaggacaggagcagctgagggtgctgggcttttgctctgtgtcgtcccatgacacgtggggcacatgtggaggctggcgtgaaggagcccgtgtaggaaaactcacgatggagggagaaggggagaagaaagacccttgagagcactgtatctcccacacacctgaggcatgtcctcaggtagggtaaggaaggcagctaatgtggggtggttgtgggaacagaagggagcgccttagctaagctggcagggagggtgctggaggcctgaagagacaaaggctgttaagtttcctcagagaatgcatgagggagttgtctagggaaacacagacctgggccatggatggaacgcgagccgttgtggctctgggggctcaggcaggtgcagggcaggcgaaggaacagctggctgtcaccagggtggagaccttgccaggtgagcataaacgaaggatggagggcactatgggaagtgcatgcagatgaccaagagttctaaactgggctgggaggaaagcaaggaaagaggggctgatggttggcgaaaaggggctgggccaggagcttggagggcctggtggtttgaagagcacagggaagcgccacatgagggagggcctggcctgagggagggatgcctcaatccagactttggaggcagtgccttcaccagtaacaagagatatgcctgcctggctgtgaggggtagaggtgaagacagactgttccaagtgaggaggttgaggaagaggcaaggacacacccctgctctaggctcaccgcacatggggagtgggaggaaaaagattccacttaagagggctgcagggtactgagtgggcttcagtaaggccagaaggcagagggaacttcctattccgagaagatggaatcacaggaattttgctgacaacagacgatgagtttcagaacgcacagtgagttggggggagggcacgggagtgctcgtgagataaaaggcagaagagggtcggcccagatggtctcagggcaagtgccatgacgacagtccagggcaacatgggcgaggctgggaggtgggggtttgccaggagcctgtggtttctcttggatcccgctgagggcagtatctaggctggggcaccatgtctgccgaaagctcagtggcagggcagagagggcctggggctgcctcgtgaggtgcgaggggttcttgtgaaggtggggaggcccagggtcagggcctcccaaagtaatgctgaaggggctctgcttccagaagggcctggacaacctcagaggtcagggtgttgagccagggggctcaccttcctctcctgccaaggggctgccagaaagctggaccccagccagcggcctcccacctctgagaggtttccagcccccatccttggactgtgggtaggggggcagagaggggagtgggcaggctgagggtctgccatcccccggggtacctcaccattccagctcccaataacagggttctgtccttgccaagggaggctggtggccagaagcatggctgaacgggtgattctacttaaccccaagcctctaaggagggtgccatgcccagttagttcaaggaacaatgtgttgcggtatagaaaaggccacacagctttgagtggcagaacctggttatgtcaaagctcccatcccacatgccatcctgctgcacggtctggtctcctggcagcttccacggcacaaggggtagggacagggagagccctggaggtggggccaggaaaggcccaagagcccccagctcctgtgggggaggggctaaacaggagagaaggcagccccaggcctaggctctctgaaaatgagactttattatacaaaactattctgtgtgcccccagctctggccaccaggctgcccctcaggccgatgggcagcggctgacttcgggaaggcagcccttcattatcagagactgtgcagcctgtggagccttcactgggggaagctctggggtgggctgggccccaacacaccctgtgtatcagaaggcccagtgtcatagcccagtttcctcatgtccttggtcaccacgttgaagaggagggtgacaaagccctgagaacggacacgggtcactggggacagaagggcagcatcagccaggctgggctggggcagagagagacccaggttgatctgggaatctcagcctcagcgttctcatctgtaaaatggggacaacagtgcctgacccaagcccctcactgggaggtaaaggggctgccgggacaggcagacatgacaaaccctctgtgctccaaccaggccctcatctgggaacatttgtgggctagctcctatgtgcctggcaggtccccggcattcaccccaaccctgggcccacccactcccaggctgtaacctgtatgggggatgggggtaagagaggggagggagctttaccttcccggccttcaccctgagccaccaccttggggtctgtgtactcgggccgccgccccatgaaccagctgggaacacagaagaacacaggtgagcagggccccacctgggcattcctggtcttggacgacactggatgtgggctctcctcggttcagaaaccagcactcttgttccaaccgcaccccacccccaccaggagtcaggccctaagcagagccttcccagtggctgggctccagcgtggggtgtcccttgccgaggtcacacagcctagccaggcctcatgtgctctgcagccacgctgcctccgctggccggttaggcttttccatctctggcttccatgggtttggttcactgggaatgagagctcaggaagattctggggtgggggtgctacctgaacccccagaaatcccagaaaagtgacagcagctgaggtgggggaggggaggggacagtgtgaccctccagcctccctggaagggggtcccaccccagagagtctgtggggtgggcagaagggccagaacggctcctcagccttacctcccactagtgtggggtccaggacatgtcacttcccatcttggcacccaccgcaggccctgccaggggcggcacacagccaccaggctgagcatgcgccctccccagccccagaccccagttgggccaggcgggaggccaggaggccgggggtgtcaggccccgccgccgacacacccacgcgagccggaaacaaccaggagcactattcccggccgggtgggtccagcagccgcgggcttcgccccgccgggactcgcggccgcgcctcctctgtaccacagctcccaaggtccccccacggacacacccggccccgagggtcgctggcaaccatgccgacccaaaagcccacgcaccgccctccccgcggcctctccgtctctgaggtgggcaccagcgctcacctggggcggctgcagaggggcccaggccagggaggggctctcagctgccgcagagttggcctgtggagaccacagccagggagcactgcccaccagcccccaaccccaaggagggagccagagagtgaaagccagcaggcgctccccaaggggaagggatgggcagccacaacccctgcgcctcagtttctcctttgggagagcaagactctcacagcacccacctcacaagaggctatgtatgaggactggggcctgggagcatccccactgtgcccagcagatcccatcccggagctcacatggagctcccgttcccactgaatttctttcctggggtccacccgggtggtctgcttagctggctggggttggggagacaagacaggctgttctgggagagcattccaggcaaggacctgaggcaaggaaggacccctcagactgcaggaactgaggtagatgggaagcaagtgggcagaggccatgaggtaggcagggcccgaccaccggcctggcagcattctggttgaagttcattctgacagagacaggttctagcaggggaggggtgcagccccagttgtgttttaggaacaccgtttttcttgctatgtgaagactagactggaggggtggcagcaggctgaatgacggcccctcaaagatagcagatcctagtcctgggaaaccgtgcacgtgaccttattgagaaacagggtcacgtgcactttgcacagatatgattaggctaaggatcttgaggcgactatccaggtggaccctaaaggccaggactcgagtgatgaggccacaagccaaggaaggctggggccaccagaaactgaaagggcaataaacagagtctcccctagagccttgggagggagcacagccctgtggtgccttttctgggcccagtgacctggattttgaactctggccttcagcatacatttctgctgttttcagctatcacatttgtgtgttttgttgcagcagccaccgtgggaaacgaatacagtggccaagagtgtttggggcaggccctaggccagcgctggaggatgtggggagaggctgggagaggggtggggatgaccgaggtgtcagcctgagcaaggagcctccatatctgggaagattctgccaatcaaactgccttcactaatcagaactttctccagtttttgtaatccaagcacatactgccttgcccagttgcgagcccctccacaggggctgtgaaaccctttcctcagcgagctgtcccctggaggcccaaagtcctccttggagctgtgggcggtggaacagggtgaataacccagcctggatggctgtgtgggtccccagtctcttaggctttcccaacccactgatgggcactgcctcgctgcctccctgacagcctgtggcatggggattgtcacctccaggtgatactggcccaggtcatctgggaaagaagtcctttgctacagggtggcctcccagaaggactcctaggggcagtaggcacacaaattctcaggctgaggccagcggagaccctgcccttcctcccctccacggctctcagagctcagtgaagcattctcggccctgggcgcgatgctgtccctccacccagcagggctctggcctggtctcacgcccagtactggccaggctcgcaggggctgcttgccggctgctgccctggaacccagggagtcctccatgttccacttgtgcctcactaatctgccggtgggcggcagaggcttgctgcccaactgcgctaatggtcctcgagtcagaaggccagggcccagctggccctctaagctcccacttggatgtgagcaggggtaagaggccttcatgctggggctgcatccaggcatcccctgggccctccctgcaggcccttgtgtcctggcccctgcctgcctccctgatgtctccctcattctgcctggcttaccacttactggccacactgccgtcctggccacaccaccgtcctggcttctctagcatgctaagctcacgctctcctcagcctggcaggcactgttccctgtgcctgatgttcttccccggctcttccctccacactaagcctctgcgcaaatgtcagctccggccagagactcccacatgtaaaggcatttatcatgattactgttccaaggtgtctgactcatactgctatatcctcttgtttcccaccttttaatgtcacattatgtcatgagcatttttcccatctgacaagagtttttcctctgctccctcagacacaaagatttttcacagggcacagggtaaaatcgcccggccttctgctgctggaacagggctgaagggagccccgtgactcagcactcccaggggacctgtttctatttgtcctcagtgggtggagcagcttgcagatctgaggaggcgaccaggcacaaactgaggggtagaatgggacatccattcatccagtagatcaggaggggctggggttatgggtacaaaactcaccttgtaaacttctgcagtttagacgtagattctgggacaaacatggggatggtccttttgtgcctgaaacaaatgtttttgcagacagagatgctgagtaagagacctttctgagcctccagggagaagaaaccctcagatcaggccagtgcagctgcagcgtgggccaagtcagggccaatgtcaacgaatccaacctgtgctaactgagcaccccctgtgtctgggcaaggtgctgagcgccaggagacagcctcatggaggtcagagtccctcagggtcttttcttttctgggtcccactacctccccaacccacctggtgtgtggctggcaccacccatctgaaaggttctcctcccaaatacaggctacaacccccctggccaccaggctgagctgcccaggcccctggagaccccagagcattcccagcctgaacctaagacagaaaacgaggtgaagtctgtcctaggacaagtcctgcccagggcccaggtcagaatgaggacctaccggccaggtgagaagggcacgtgcacggccccatagcctcgaaccacatcgttcccgaacacatctggtccatacacgctgagcacgatctgtggcccttgggaaggacaaggcagggggtgggcacatgaggacacacaggggaggtgcagggcagagaacagggcgtgtccagctgagggtgctcaaaggatggagctcaaaactctggggtggcaggcttgagaggggacaggagcaggcatgggaacccagactgtgccaaagacttctgcccaccctggtacttcctgtgtctccactgaggcctgggcacacattccacaccccttctcaccgctatggagtcagtgcccactcagtcactccatgtacaaggaggcacttccagaggccttatctgggcccagggccccagctatgatcagggccgactaaggacctctgctctctgggtgctcccttcctgatggaggcgggctcatgggactgaggtggcaggggctcattttgggggtgtctagaagtcagagagaaaagaaaaaccttctgggcattttcctttaaaatattataggtactataataggtgtggctgtttttacacccgcttcgtgttgccattgaggcgcatgaggcactttcacctcgccagtttcaggtgaggcccagggagggactaggagccggcctgacaggctctgatcctgcagccacgactgaggcaagttagccaacctctctgcccctgtttcatcatctctaaaacacatgaaatagtacctaatgcatagtgagtgctcagtaaatgttagggagaggtttgtgcccttcccattactaccttccaccaaaggtaaccattattctgaattttaggaaactacctctttacttttctttaagacttcactgccaaagaatgcatcccaaacctggtactttacctttaccaatgtttttgaaagtttatacaaaaggaattatacagtacatttatttttgtgcccagactctaatccaaaattatgtccattagattttctcaaatggtttcctgtaaaggggcgtgttcatgttcaataccatataacattctgcgtgggaatctgtcacaatgactgttcattctagtgctgatggacacatgggctgcccttcctctgggggccacgcacccagtgctgagcaccatggcgcaggctctcggtactcgcgtgcacacatctctggtgggcacacacccaagaatgacactgcacagggcccatgtatgttccctcccaaaaggtaacaccaagctgccagcatggtcctatcagccagcactcccccagcagtggtatctgattcctgctcctctgtacctcacgaaaacatggcattaccaatcttttaaatttgagccgtcctagtgagagaatagtggtagctcactgtagctttaacttatattttccttcattttagatttttcttactgaaataaggttgagacctttacctgtttcttggtcacctggatgtcctcttttgtgaagaacctactcaagtctcttgcccggttttctacttgatggtctttttcttttttcttcattaaaaacattttttttttttgagacagggtcttgctctgttgcccaggctggagtgcagtggtgcaatcatggctcactgcaacctcaacctcctgggctgaagtgatcctcccacctcagcctcccaagtagctgggactataggcgtgtgctgccatgcctaatttttaaattttttgtagagatggggtctcactatgttgcccaggctagtctcaaactcttgggctcaagcaatcttcctgcctcagcctcccgaagtgcagggattacaggtgtgagtcaccttgcctggcctggcctttttcttattgatttatagtgtgtatatgtgtgtttatcctgtgacttatcttttcatttttagtgatgtctttgaatgaacataagcccttaattttaatatagtcaacttcattgatcttctccttcatggagtcctgccagaaaatcttcccttaccctgatatcatggctatagtcctctatgctacatatccatctgaaattgacttgtgtgtatgaggacaggctgaagttttttcctatgtatatcaaattgtcccagcaccatttattaaaaagaccaggctggcgggcgcctgtagtcccagccactcaggaggctgaggcaggagaatggcgtgaacccgggaggcggagcttgcagtgagctgagatcacgccactgcactccagcctgggcgacagagcgaaattctgtctcaaaaaaaaaaaagaccaggctgggagcagtggctcatgcctgtaatcccagcactttgggaggctgaggtggcagatcacttgaggccaggagttcaagaccagcctgggtaacgtggcaaaaccccttctctatgaaaaatccaaaaattaggcgaggcgcggtggctcacacctgtaatcccagcactttgggaggctgaggcaggtggatcatctgaggatgggagttcaagaacagcctggccaacatggtgaaaccccatctctactaaaaatacaaaaattggctgggtgtggtcgcatgtgcctgtagtcccagctactccggaggctgaggcagaattgcttgaacccaggaggcagaggttgcagtgagctgagatcgtgccactgcactccagcctgggagacagagcaagactccatctcaaaaataaaaacaaaaacaaaaacaaaaattagccgggcatggtggtgcatgcctgtaatcccagctacttggaaggctgaggcaccagaatcgcttgaatccaggaggccgaggttgcagaaaaaatctttcaacatttcaccagtaaaagtgatgtttgctctaagcttttcatagataatcttgatcaggttagggaagcttccttctattcctagtttactaagcttttatcatgaatgggagttgaattttaccatgtgttttcttcatttatggggatgatcatgattttttttttctttttttttttgagatggagtcttgctctgtcactcaggctggagtgcagtggtgcaatcttggctcactggaacctctgcctcccagtttcaagcgattctcctgcctcagctttccaagtagctgggatcacaggcgtgcgccaccaaacccggctaatttttgtatttttagtagagaaggagtttcaccatgttggccaggctggtctcaaattcctgacctcaaatgatctgcctgcctcggcctcccaaagtgctgggattacaggtgtgagccatggtgcctggcctgactctgacttttcttctttttaatgtggtgaattatttagagacagggtcttgctacgttgcccaggttagtctcaaactcctggcctcaagcaatcttcccacctcggcctccatatgagccactgtgcctggccaactatagatgtcataaaacctttgtatttttggaataaaccctacttctcatgatgtattatattatcctttttttatcttgctagtttctgaatatttcatttaggagttttgaattcagtttctgaatattttgtttgggagttttgcaactctgttcatgaaggagtttcttctttttaatgtcctcagcaggctttagaatcaaaactatgctgacctaaaaaagctggggaatgtttaatcttttcaattctaggagtttgtgtaaatctgtcgttacttcctcttcttttttttcttacacttctgccatggaaggtgtcattctttaaatgcctggtggaactcagtgatgaagacactcggacttggaactttctttgtgagaacatttttaattatagattcaatttaatagacataggactactcagattcttattccttttttgcagttttggtagttatctttttctaggaatctgaccatttcatctaccttgccaaatgtatagcaaatggctgttctttatatcttatctttttactgtctgcaagatctgtaacatgttcctttttcattcctgccatttctgtcttctgtttcttcttattattttttagagatagggtctagcgctggcacccaggctggagtgcagtagcatgatcatagctcactacacccccaaactcctaggctcaaacaatcctcccacctcagcctcccgagtagctgggactacaggtttgagccactgtgcctggccaatttttctattttttgtagagacagggtctcaccatgttgcccaggttagtcttgaactcctgggctcaagcgatcctaccgcctcagcctcccaaagtgttgggattataggtgtgagtgaccccacttagcctgttttttcatcgtcttaacttggggttttcagttttaaaaaccaacttttgcctctttcatctcttctgttgtaagtgtgctttctgtttaatgaattaatttctgctgtttctcattctattctgctttctttgggtttaacttgctattcttttactaatttctttttttttttgagattgagtttcactctttcgcccagaccggagtgaagtggcacaatctcagctgactgcaacctctgccccccaggatcaagtgattctcctgcctcactcagcctccccattagctgggattataggcacctgccacgggcctggctaattttttttttttttttttttttttgagacggagtttcgctcttgttgcccaggctggagtgcaatggcatgatcttggctcactgcaacctccacctcccgggttcaagtgattgtcctgcctcagcctcccgagtagctggaattacaggtacgtgccaccatgcctggctaattttgtatttttagtagagacagggtttctccatgttggccaggctggtctcgaactcccgacctcaggggatccgcccgccttggcctcccaaagtactgggattacaggcatgagccactgcgcccagcctatgcctggctaatttttaatatttttagtagagatggggtttcaccatgttggccaggctggtctcgaactcctgacatcaggtgatccacccgttttggcctccgaaagtgctgggattacaggcgtgagccaccacacacagccttcttttactacttcttttttttttttgagatggagtctcactctgtcgccaggctggagtgtagtgacgcgatctcagctcactgctatctccacctcctgggttcaagcgattcccctgcctcaccctcctgagtagctggggctacagaagcccaccaccacacctggctaattttttgtattttagtagagatggggtttcaccatgttggccaggctggtcttgaactcctgacctcgtgatccacccgcctcagcctcccaaaatgctgggattataggcatgagccaccgtacccagccactaatttcttaagagagatgctgaaatcattaatttttcagcctattttcttctctaacatgcatttaaaattacaaaattggtcaggcgcagtgcctcaggtctgtaatcccagcactttgggaggctgaggtgggtggatcacctgatgtcaggagttgagaccagcctggccaacatggtgaaaccccatctctaataaaaacacaaaaaaaatcagctgggcatagtggcaggcgcctgtaatcccagctacttgggagggtgaggcaggagaatcatttgaacccgggaggcaggtttgcagtgagccaagaccgcccgccattgcactccagcctgggcaacaaaaacgagacttcatttcaaaaaataaataaatacgaccaggcatggtggctcacgcctgtaatcccagccctttgggaggccgaggtgggcggatcatttgaggtcaggagttcgagaccagcatgaccaacatggaaaaatcctgtctctactaaaaatacaaaattagccgggcgtggtggtacatgcctgtaatcccagctactaaggaggctgaggcaggagaatcggttgaactcaggagcaggaggttgcagtgagccgagatcgtgccattgcactcctgcctgggcaacaagagcaaaactctgtctcaaaaaattaaataaataaataaaaattaaaaataaaataaaatgacaaaatttccctctatccatgactttaactgccccctgcaaattcaaatagctcagtatttttattatcattcaattcaaaattccattattccatcagtatttcttctttgacatatgggttgtttttagaagttattttcttatttttcaaacatatggagatttttctcattatccttgctattggtccctagcttaagttcactgtggtcaaagaaaatactccactcctcctgaaaagctaaaagaattccaatgtactggcgctgactcactaccggatcaccactgacagctgagtctacttgctttactgcctctccccatgcctcagtcaactcttcctacttgtgaggaatttcaaagtaaatcacagatctctggacactttccccaaaatacttcactatgcatgtcagcaaatagagctcaatatttgttcacagttcttttgagataaaatttatgcataatgaaacataaatcttaaagtgtactattcaatggattttgacaaatgcatacatctgtgtactagctgctttcaagattttctttttggctgggtgcagtggctcatgcctgtaatctcagcactttgggaggctgaggtggctggatcatgaggtcaggagttcaagaccagcctggccaaaatggtgaaaccccatctctactaaaaatacaaaaattagccaggcatggtggcaggcacctgtaatccccagctactcaggaggctgaggcggagaattgcttgaacctgggaggcggaggttgcagtgagccgagatcgcgccactgcactacagcctgggtgacagagcaagactccgtctcgaaaaaaagagaaaaaaaagattttctttttgtctttggttttcaactgtttgattatcatgcacctaggggtgggtttcttccatttatcctgcttgagttttgtcttcttgaatttgtggcttgatgtctctcatcatttttgaaaagaattgtagctatttatcccttccaatattgtctccagcttgtcctctccccctccttccaggattccaattccatatggcagactttcagtattctctgtctcctaccttctcatctatattttctattcttgggtttcactgtagatattttcctttgacctttcagtatatagttatctcttcagctgtgtttaatctgctgaattcctgcttttggttatcatatttttcaattctagaatttctattacaatgtttaaaaaatatggccaggcatggggctcaagcctgtaacaccagaactttcttaggccaaggtgggaggattgcctgagctcaggagttcaagaccagcctggccaacatggtgaaaccctgtatctactaaaaatacaaaaaattagccggacatggtggtgcatgcctgtagtcccagctactggggaggctgaggcataagaatcgcttgaatccaggaggtagaggttgcaatgagctgaaatggcgccactttactcagaaagacagagcaagactctgtctgcaattaaaaaaaaaaaaaaaaatcggctgggcgtggtggctcacgcctgtaatcccagcactttgggaggctgaggcgggcagatcacgaggtcaggagatcgagaccatcctggctaacacggtgaaaccccgtctctactaaaaatacaaaaaaaaaaattagccgggcacggtggtgggtgcctgtagtcccagctactcgagaggctgaggcaggagaatggcatgaacccaggaggcagagcttgcagtgagctgagatcgtgccactgcactccagcctgggcaacagagcaagactcagtctcaaaaaaaaaagtcaggcttcctagttctctgccataattctcagtctgttttatctcttttgatcatagtaaaaatatatctgacaatttcagtgtctagagattctgtttatctctattgctttattgccttatttttgctggttatcatttatgttgtcttggttcttgtgtgcctcattatatgccagatactacatttgaaaaaatatatagaaataattttatgtctatgagatgttatctttctccaaagagttttctttctttttttttgagacagggtctcactttgtcacccaggctggagtgcagtggcataatctctgctcactgcagcctcgacctcctaggctccagcgatccttctgcctcagccccccaagtagctaagattacaggcgcccacccccatgccaagctaattttcgtatttttagtagagagagatttttgccatattgcccaggctggtcttaaactcctgagctcaggcgatctgcctgcctcagcctcccaaagtgctggaattacaggcatgagccaccatgcccagcccaaagaggtttctaatttgtttttgtcaggtgccttggtgtaacaatcttggagctgaatagaagaatcaggaggttgaaatcatcaggggctgagctgaaatccctgtgaggctgctctgcttccatctctcccttattcctagggcagctctttgaggtcttaacccagttggtgagatttacctgaggccctcctcccaaccccttggaaggctctgaacatcagtttttttgtgtcctggacccagagaggctgtcaaaagtcttgatcagtctctcaatcacctctattgaaatcagcaaacactcccagaggagatgggattggggtaacctctctggatttctgttctcctggatcttgcctggtaaatctcttctactttgctagctctctgatgcctctgaggtagttgctttttgtttttgcttttgtgtattacatttacctctcctacctgtcctcggcaggaggaggttcgtccagtacctacagtacctattgcactgttccaggaagtctattgaaacttcctactcatggatgatgacagcaggatggaattccctgctcaggaggaccaccaagcattttctgctccagaccctccacaccgtggtaagcctaggcccaggccacgtgcagtagaaaggcctagattgtgaaatcagatgggcctgaattaaaatccacacttggtcactagatgtaaagcagaaggcaaatgatgtcaattttgagtgtcagtttccttatatgggaaaagaaatggagagaaatctctccagcaggtatgattgggaagctcggataagtccacacagtgaaagtattcatagtccccatggagactaagcccaggctttgtgcacagtaggcacttatgaagtgcaagtgaacaatcagaatggttaataaccaccagccaaggtagaaagtaagcaatgccagccaggaagcccttgggaaagaggttagacataggacgtgggaatggtatccagacagatggatcggcatgaataaagctcagatgaagaaagttgagggactagcacaggaggagaaagtgccagggtctagccggaacacaacacgccatgggaagtcagcaggcacagagtcaggcctccaggccaaacagccacagtcctgcatgccagggtggggagcctgccttttacaggcgtggccactagccctgatgcactctgaacttccagaaggccagctgcacagcctgtagcagatgaagggggtgagtggggatgaggaagaagaggagggaaagggacagatggcgagagagaacgttgagggctgcttcaagagcccaggtgacaatctgaatgtgaacagtcatgggctggatgaggcagaggctgtcttgggggtgctgtgtgaaagctctgccaccctaccccacagggcccctgcagactcacagccgtaggggttggtgcttttaaaggtgacatcaatggggaagttccacaccagtgcttgccgcacatcttggctcttggatgtgatctgtgagatcccctcctccagaccctgtgaggacagtgacacagacggctggattcagagcagagccaagctgctgcggctcctccccttaccttcagcaggcagttgggagggctgttttctcagctgtcttctcccaagacacgaacttccaaacaaaggggactaagagatgatggagtacctctttaagtctggtactttaacgccgtagcttgacaaccctgggaggccagccactctcccgggcacaagggcactagatctggtcccaagctcttgccccactgaaggaatggtccagcatgcttacactctcctgcatccccaccctcacctgagtatccccatcctcacctgagtatccccatcggtaaatacgtaaatgtgttttctccatcaaaaatagtcctctttcaactctgcggcttcttccacccaccaaccctttctctgctccctttatagcaaaactgcctcaaagagctgccacactcaccggctccaattcctcccctgctattcttttgtgaccccactccaatgtgactgctggctccagcactctaccaaagggttttctccattaatgcccgtgaccaacattgctagatccaatggtcatttctctatcctcgtgttacttgacccatcagcagcacctgatgcagctgcttactccttgatacactgtcttcccttggcttctgggtctctccactgcacagggtggcccctgctcagtggctcttgctggttccttctcagtgttgccgtcctaaggctgcatctttggccagctcctctacctgtacttggtgatctcatccatctcatggctttcaatgtgctctagatgtcgatgattcccaaatttatgtctccagcctggtccttgcctctgcactctggatcagcacctcctcttggatatccagtgggtgcctcaaccttaacccacaccaggctgagctccaggtagctctccccaatctgttcttctcactgaaaggcagctgcctacttctaagtgctcaggctaaaagccctgctgtgaatcctaactcctccttctctcagacctcacatccatcaaaagaacccagcggctctatcttcagaatatacttgcagtccagcccctcccaccaccccactgccactgccctcctctcccatctccactgctgtcagagccaactgggctgcctgctcttgccctttccccccgagtctatccttgtcgtagaagccagggaatcttctaaaaacataagtcagatcactttctctgctgaaagttctccagtgggatcccatctccctttgagtaaaggtcacagtccttactctgacaagacctgcccaggtgcctctctgctccagccactctcctgctggctcgctctccagtggccacacagcctccttgctggtcctcaaacatgccaggcaagctcctgctccagggcctttgcactctctgctgtttctgcctggacagttctcacgggtttccacatggcttgttccctcacttccttcaggtctttcctcaaaagttactttctcggcaaggccctccctggcagccttagcgagatcgcagcctccttctcatcactcatccctgtcacttcctggcttggtctcccctcacacttctggcttactaacatcctagaatatgcactccttattatctgaccccccagcaagaacgtgcgctccgggaaggcagggtcttctggtttggctttgctcacccctgcatccccagcacccagaagacaatcaataaagggaaaagaaggattatcatctcagttgtacaaatgaggaaactgaggctcagagagcttaaataagttcagtctccttttcttaaactgctatgaagatgaaacaagtgctttgcaaacagcagagcacagagcgggctgaagttgtcaccacagtccctcacctggtggaggcaagctaccccttgggaagtcctggaaggagagctcctactctgtctttttactccaggtcctccccactggctgaggagaggccaaatggtgagcggactggccagagtgtccacagctcagccacgtccaggctggctcactggggcctgcctcctactgcaggtgttgctctttgctgccccggggaagctcacagggtagggcttctgagtgcagtcttggtggatggatcagggagtccaaccatggctgtgtcctctgctcccgctttaccaggaacactcatgtttgggttcccctgaactcagtctctacctcttaacttgttctgaatggggaggggaaggatatgacaccttcagaaaccccaaaagtcatgaaggcggtaagggaggcccaagagtccagcttaccgctgtgggggcccagtcctggccgtacacaaagcagtacttgcagtagaggtcatcatactctggaaactgaaaaaagcacagacagattctgtcgactggtattcatgctgaggccaatgcatttgctaggcaggtgcagccaaggggaattctgaacgtgagacacctgggagtgggtctaagagacggctggagatgtgttcagaggagaggctgaggaccaagaagcgggagtccacgggagactcccaggtgccacggcccctggcttttgctcaggctctgccttgtctgatttgtccttcctacttcatccggaaaactcctgctcacccttcaaaacttacccttcagggagcctgctctaactctcaagctggtttaaggtctcctcttggctcccttagccccgtgcttccctccataaaagcaatgattgcctgtgtctaagtctgtcagttcctctagaccatgagtagagaagagatttaatgcctttctgtgtccccactgcctggcacagggctgggcacagataaggtctaaggcaggggtcctcaaccagtccgtggcctgttaggaacgggtccacacagcaagaggtgaggagcaggcgagcaagcaaagcttcaactgtatttacagctgctccccattgctcgcatgaccacgggagctccacctccttgtcagatcagtggcggcattagattctcataggagcacgaaccctactgtgaactgcacatgtgggggatctaggttgcatgttccttatgagaatctaacgcatgatgatctgtcactgtctcccatcacacccagatgggaccatctagttgcaggaaagcaaactcagggctcccactgattctacattatggtgagttgtataattatttcattattatttacaaggtaataatagaaataaagtgcacaataaatgtaatgtccccaaatcatcccaaaaccatccctcgccacctggttttccacaaaaccagtccctggtgccaaaaaggttgaggaccactggtgtaagggaatggtgctgaagtgaaaggtctgagaacccaggaagccatcatatgcaaggctggagctgaggccctgaaaagagggaggtgctgagagcagagcagggaggaacagtgtgactgtcagtgtgtgtgtggcgggggggtcgctgatgctgagagcacagacacatgtgactcagcccagccgagagcccctaataggaaaggacaggagagtggggaaagacggtcttaggcactaggctaaggcagaggcggacagggtgggagcatggagtagtatccctgatgaaataggaaggcaggagacacctacaaagcatcaggccctgtcagagccttacccaaaccgtctcagtcaatcctcacaataatattataaaataataataaacaccacctccaacagcctggaaggacagtgtagtgaagctttgaggtcagataggcgtgggttcaattcccagacaggccagttcctttggtatatttccccagctgtaaaatgggggtgttagtagtgcctatctggtaaggctgtaagggtggaccagtgcggagcaccgactttgggacatattgaggacttggtgagcgttggtttatatttacaataaatgattcctctaaagtgtagggggatggggaatagcgtccctcgggcctagcaggcacaccttccttgggtcaattccaggccaccaccattgttggatggttggattcgaacccgagttcaaggatctggggattcagaacgcgggacagtaactccacacgggacacagcgcaaatgctggaaactcggccaagcctcggctcctcgcgttaaccccaggaggctcctgccagtgatccaagcaagtgggcatgacccgtgcgagggcccacaggcttgcccgagtgtgacctcggtactagctcaacatctcgaggtctgcttctattcctgcacatcgggactcaggatccgggcaacctcgcgccaagctctccaatgctggctcccctcccccgcctaaccgagaggctcagaggaatgacgtggctctccgggggccacagggcagcccggggggttgcgggaagggccccgggggacgctggggggcgggccccggcggggtccacggccgctcacctgggcgctctccacctgcccgttgaccatgagtagaaagacgctaggactcgcggtcgccatggcaggtctgggggtgccggggggacccacctaggccgcgcgcggttgctaagagacgccggcgttgccctagaaacagacggcgtagcgcgcaggacacgtttcttggcagcgacaccttcgcgaaggccacgcgagtgcgcgtgtggcatgcgcaggcgcagtgaacgggcgccgttataagggggcggggcacaaggggcggggatccacgccgaggctccacccctccttagggcaggtatgaccgagagctggggcgggagcgttgacctgtcgggtaaagccagccctaccgctcgactcagttgcacgcgcagggagtgtgtgttcactctgactcggcccggctccccgtccccgccgaagcgcagaggcgaatgagagctgagtcctggggagcagcgctccgactcacgccctcagcaagccgagtgtttaaaatacattcagccactagatgtcgctgtggccccaccgcgaggacgcggagggaggcgctgcagagcacgggcgacgtgaccacagctgtcggggctaactctggaatgccgggtgctcggaggagcctccccagctggggccaagcagcgtccaagcaggtgaaaaggatgcgcccctgtggcttggagacgcttgccctcgaaaaagtttattaaacaaacttgggagggacctcaagaatccttacatccaagccatcgctctttagttcgaagctggggaaactgaggcccgcagcgggcggcgcctggcaccccaatcagccagcgctcaggggagttgctagccaaaatccacgaatctgtcaagatacagtcttgtatcttagtggcctgtcacagagtaagcacttggtaactactaacttgttgataaatgaataattgaagacatctccattttacagaggaggaaacagattcagatggcaaaggcaggtaagtagctaagtcaggattcaaacccaggactccagaggctaacaaccctcactgcctctgtcttgtcctgggccagccccaacagcatctgttggcagaggtgtcaaaggagacgttggagacattatcttggatccaggaaatgaagggattcacaggtgtgtagactcccgggaggccaggctccgagcagggaccccaggtcatcacattctgcagcttctagcttgggagcagactaggggagtcccatcaaccatctgcacgagggagggaaggagcagtctcagcccagcctgcacccactgaaccaccccctgcctagtgagcaaagatatttgatcaggggagggaggcagcgggtaaccagttcacacatctgacaagagcagctgggggaggggatgggtgggctggtggcccaagtgctgcacccagagcccaagacagggcccatttcccctcctggagagggggtcatactcccttcttcccccgctctgtccatctctttccagttaaagtgctttctcccacacattctatcagtctcacccaattatttcctccctttggcctttgaggctcggtgttgcacacaagttagttttcagcaaaatgcttgtagttatcgaataactgggggctcccagtagtttaagacctggctataccaaaggtggccccacattcaaataggacataatgggggagtctccccaaggggtgggaagttctagggtggccttcaggggtacaaataagcccgacccctgggtgttggggaatggaagactccaggataggatgggagggtgaccaggcctaactttaacaagtctagtggcattagaagcgactttaggagaggggtctcaggggcttgcataggggcttgcatagggcctgctggaatccttaccaccagttcaagggcccagtggagagcctggtgtactagaagtccttgggcaggctgtccttcaggtcaggacagtcaggttggaggagaaggtagtttctgcagatgctgacacacagcgatctcagcaggacactctgcagctcttggggtgggatgtagggatctgcaatggggtggggcagaccctcagcccagctgacatccagccgatctgcaccagtccagccatgctggttgttaacatatattgctgagcttccctgcctgtgcctgtgccaagtctctccacccccagatgccttcctgggctcctagacattcctcgctcccacctcactcttagtacagctctgtcctctggtacactcccacgcagtcccctcagggaagcttccagcacattgggcaggcggggctgtcagccattgggcaggggtgaggctggaagctggcttgagcagagcaggtgtcagcgccagccctcttccctgcatgcctatggccatggtgctgccgggcagctggccagagcccctgcagggtcccaagctccaccctggccatctgcctcccccagtctctcaaccatcccaggcttctgctcccatccttactgaaatcgggttcaaacccctggccccagcagagctgtctcaggaagagggaacagtgggattgagtggccagggggacggcctgcacagcgctggtgagcgacggaggccttgccccttgccagttgtgccaggaccaggctaccaaacccagagccctcgggccctgctgaggacaagagcagctcccccatggtaacctgatctcacaagagtccatctgcagtcgatctggacccaaggtcacactgaagtgggaccaaggccaactgtggagagaggaggtgaaggggaggtggagagctggagaggctgggggccaccctcctggagcccctctccaccacccctcctggctgtgcacccacctgtcaaagcagttggcgcctgtgagcacccactcttgggagatgagggccccctcacagcggcaccaggtgtccaggaagatgctggcctggccaagccatttgtctgggcccttcttgctggaggcctcagccagcctggaccctgcacctcaggagactgaagcctcagagctcagctccgggtcccagggccttgcaggtctaccatgcatctctttccatccagccctgcgatctctgcagcccagcttccacccctcacccctccagctcaaaatcagactgcctgcagtggaatcctatgtgactcagggaaagtcctttaacctctcggagcctcggtttcctcatcacacccagggggttgttgtgaggattaaatgtgataatatatgtcaaagttccatacatttgtagctattctttttttttttttaattaaaaagtttatgggcacatagtaggtgtatacattgcagctattcttgttgctgaagtcattcctggggtgctcctgctttttcatgcctcctggtttgcacatgctgttccttctacctagctcatcatctcctacctatccgcccagagaactcctatgtagccttcagagcccactcttgtgaagtcttccttgaacgcctctccccttggccccacagtctgctccccacttcccacccagaagctcattataagtgggtgtccggctctgcttgcttttctctttagacagggagctcactcatctctaaggaagctgggcctccttgaggacagccctccatctgctctgccctggtcatcggggtccaccctcagcaccttcaaggggtggggagccctggggtgcacactaggggcaggcatcctgcatacagacttggcgctggggtctccagatcctcctcccaggagcttgtcctgggtcctggggcaggggacttcttagagtcctgctctgccccgtctcaggtaagaggcagagagggcagctggctgagaccaacagtaacaataataatcccatgtgccctctctttacacccccacgaagtcctgagcccctgtgattctgggctcctcacagtgaccccccagaccagtgctcctagcccccttttacagatggggaagtcgaggctcagagacaaaccgacttcccaagatcacagtgagttggaagcagagttgggattcaaatcagggtccctgtgactccaagtccccaaatcatttctctcaaaggccttataggtctttccttctgtctttgcctcttggctcttcagcggaggggccacacttggaacaccggttgcttgaaatgcctggtgcaggcactcggctgaatttcacaaatggtgcaaagtcaataccctttgtggcctgtccctgacgattccttgggcctcacctcacccttcccctcaggcttgaagtactgtatgcctgcggttctaggtgggcaggtccatgcaaaccagaagctacaggggctgagaggccaaagagagaggcagacaaatctggtttctcagaaagaagcatttaatagaggcacataaacagaagccatgtctagggcggtcacgagacatgtaggtctctgcactgttacctctagagccagggcatgtatagcatagggaaagggcatacatgcttcagaaggggtgtgtaggacaattgatcagcattgccagtgacggtagataaagtagaaatcttagaggcctttctggaactggggtcaatcagaagccagcatggcagatttgcctctgagatggagccgctttggcctctgcacctgcacatgacgttctcaacaatgttgtgtgtttattttttgagaggaagttcacataacctaaaatcaatcttttttttttttttttttttgagacagagtttcgctcttgttgcccaggctggagtgcagtggcgccatctcggctcactgcaacctctgcctcctgggttcaagcgattctcctgcctcagcctcccgagtagctgggattattggtgcctgccaccatgcccagctaatttttgtatttttggtagagacacggtttccccatgttggccaggctgggctcaaagtcctgacctcaagtgatccacctgccttggcctcccgaagtgctgggattacaggcatgagccactgcacccggccaatcagccattttttatgtgtataattcaggggcattctgtatatcaccttgtctttgcaaatgttgttcctttgttctagaaagtccttcctgccatttctgcctggaagcttcctgttgaacttcaagagcccgataaatgccccttcctctgggatgtcttttttctgatccccaacttggtctaggggctctccctgggcttcctcagccccttggtcacagcccttccacactagtggtctgacttggtctccccagccagactcaaagtcccggcatatgcagtggagggtgggtgcactgggatcatttactaaatgcttgttgagtgaatgcatgagtggaggtctttggggagcactctggggggccctgaggccttgtgggtagggctgggccctcgggttccagccacagggagggcctagagtctgacatggggagagacaactcggatccagcctcctgcagcataacagaataaaccggtctgggtctgaggcagagcccgaggtgggatagagggctctcagtttccattatcagcctttcctcaacttgcagtgtgagcccaggccagtcactgccgtattctgggcctcaaaatcttcattaatgagaagagggcattgcctggactatctcactctcctgttaagtcatttgaagggctgcgggaatccctggcctttctaaaccgtgactcgggctaggcatgccccctttacccctgaagctcacgggagaaagtgcttggagtagcttcttctaggagttagtcagcagacagagctgagttccaatccaaactcttccccctcactggctatgtgaccttgggctgtttgcttaacctctctgagactcagcttctgggaaaatgaggaacataagatccctactagtagggctcagtaaatgtcagcaatggtctccacagtgaagatgatgacatgattggagtccagtttacttgcagacagacaagttgaattgctggccaaattctgaaaaaaatcgtaggtctttaaaaatcattcatttgggggcggggcacagtgactcatgcctatgatcctagcactttgggaggctggggcaggaggatcattcgagcccagaagttcaagaccagcctgggcaaatagagaccccgtctctaagaaaaatacaataaataaattagccaggcatggtggtgtgggcctgtgaccctggctacttgggaggctgaggcgggaggagcacttgagccagggtttgaggatgcagtgagctgatggcgccacagcaagaccccatctcttacaaaacaaaaacaaacccagaaccatgagttctgtttcttaacactggatgttactgagtataagcacctctgacggttctaggatgcttgtttctaagagctacattttccccctctgagaaacagtgaagtggatgacattctttttttgttcttgagaactgctatgaagaaaaaacatgaagcatggcaaagagctagcgagggatagggaagcgtatagggttatggtagacaagcaattctcctctcaggagaagacattggagcaaagtccagaaagaagtgaagggttgagtcatgcacggatctgggggtgtgtacgtccaggcaaagagcatagtcggtgcaaaggccctgcatggagggaggggcagtctggagcctgcctgcactgagacaactgtgcacctcttcccagggccgcgttcggtgtgtcatgctggtagcttgcgatcagccacggaaggaatatttacactaaggaaattggccaatgcaacaatcagggctttactattttatattttattttttctcagaaaacgggacgtgctactttaccagcacatcactgggggtaggagatgaggtcagagaactcgccaggcccagatcacccagcgcctgagtggctggaggttaagtgagttgggtttttacagggtccctctgtgtgggtgtggggggaaagctgagaggccgaggagcaggcagatgtggtcatccaggtaggtttgccagacttagcaaagaaaaatacaggatgcatgcactactcgggacatacctaactaaagaattatttgttgtttatctgaaattccaacttaaaacactgggtatcctgtattttagctagcaacccaggtggcaggtggaagatggagattcacgattgcttctggaagactcgctgtgtgattccgcccaccccatggccattccctcctcctgagatgttcagagcaggattcctacctagtgccccgccaaacatggcccacaccccaagtcaccctggaccacacccgcccctccgtcatttcctacaggcttttcctgcagattgagagaggaaactgggcagggagcacaccactgatgggtgaaatgatgatctcacaggaaaccagacaagctagagttgtcaccacaccctggactcagagaacttgggtacttcaccgacggccacctcccatcgccctttcattcttcatgggcagggccttgcaagccttggtgatggattttattccatgagatggggcagctgttgcaggaacacgatttgagttgttttttgaaagattgctctggctactgtgcagagtggcttctcagggtgcacacgggggagatgtcgtaggacaactgggtgttggatctggagctcagggagaacaaccctcagaggagatggcccctggctgagcctggagataccaccattccagagaagagcagagggccaggagaaggggcgtgtggctgtgtggttgacatctcgatgacatgtgctgtgtgtgtccctcacagacttgggatctttctgggaggcaaacacaggccttggggaatgttctgggatgggcgatgtcagcctcagtgtgtttgctcagctgctgggctctcttgggaccatagaggactgcagcaccaatggtggaactccaggcgtggtgacaggatgtgaccaggttcccccacccaggtctgtggtcagcctggctgtgctgaatggtggaagcaggggtgaggccccgagaggtgtctggagccatctggccgtgaggtcagccacccagccaggcctctggaagccatgggcagccacttcccagatgcggcttcctgccctttcctccaccaaaaccacactcagctcataggctggcctcaggggcagtccctttcccacggggagggccgcatgcaaatgccacactgagctgagccaaggcaggggtcaattctgaaggcctggatcctccatgtcctatgggcaggtcaaccacaacaaagcccagcctgcccatcaagccccactgctttccactgctttggtgccttcgcctctctgggtgaaccctgctcaccctgagcccctgcatgtaaggcacttttagatgcaatcatcccctgcgattttcctgatacagggagaagaaggcaggtggccctggccactgtgtgtgctgacgcagagcgaacaggcagcagcactggagggagggaggagtgtgtgtgtggctgtgcgtcctgtgtgtggatttttgtgtgcaagtcccgtgtgtgtacctagcatgtatgtcccagtagcttgtgtgtacctgtgccctgggtgtgtgcttgtgcaaatctctgtgtgtgtttgtgcaaatctttgtgaatgtaaacctgtacctaagagtgttgtctgtgtgtcaacgtgtgtgtataggcgcctggaaccagttatgatttagatcaacaccccactttcagccttggcgagattccttcctgcaggaccggggaacagatcactactcccattttgcagaagtgagactgaggctcagagagggccgagacttgcctaaggtcaccagctgatgggattacaattcagtccttacctctatggtggcttctaagggttcatgggtgttcttggtcccaaactctcctccccaacctgttccattggtgcctgcaatacccctgttgggaagagacagtgtccttggcagattcatctgttaaactggcctcccttcatgaaacagggacaatccatccttcccaagactgtcctagcgggtagatggcccctggagcaggagggcctgccaaggaaggcagggaaggggaaggggtgggggtcctgcagaaagacaactgcctgcccttcagagtgtgggctgtgggagaggctgccacagacatgggtgtgggttgtggtttggccacttgggcttcctcctggatgccccagccacacactgggtgactgaaccggattacttgtggctgctggcactaatcagagagctgtgtgtgtgtaaagaaggaaaacctggtgcagggagtcctacaaacagaggcccctcccacagttgagcccattttgtcacctgtaaccagggacaatgatgcatcacccgagtccccctcagagaaagatgaaggtagaaacgcttacacactgaagatgctgctggaacaccgcagggactgggcggagcggggacagcgttaacaagggcggctgctgcagtgtgggtgaagggccagaccttgtgtcaggtgcccctgcagatataattcctcgagtccacaaaacaatgcaaccaggtggatctgaacatccccacttcacagatgaggaactcgaggtcagggctgtcagtcttggctacctgcatggccttggggccctgcatggtctcacccctgcctaactttctcgtctccatgtctctgtgaccccctccctcctgccacttccctctggccttctcgtggccctgagatgtgccacactctcacccgcatcagctctgtgtcctttgcccccactgtccctctgctgccgcatgctcgtctattaggtcctgacttacatgtcacttccagggccccttcccgacttcctgtgctgggcaaagggcccattcttagctccccagggccggccccccatctcggtgcctgtcacagatttccctcatcagagaaagctgggacttgtgctcatggctctgaccccagcacacagcacagacaagaaaggatgccccggcctccatgtgacggagctggattcaaacccaggtgtttctgaaaccaaagcgtgccttcgtaaaacttaagagcatgggattggaagggaggcagtaacatcagcagagcggcaccctgctcggacaattcacctgcgctcctcaaagtttttaaccacacccactcttgcggcagaggggtgcgaacagttgggcacatctattatttctgctgacccacgtccatccaccttcctgaaaactcaggtttcctgtggggaaatggccctcatccatacgtggtctgaggagtttggctgagccggactccctgtgccacttccagaggtggacaggtgattcaggtctggccaatcagcatacccctcccctcccccacgctgagcctgtccaatgggaggctaccctggaacccatgctgggactgacaaaaagggatgcccactgccgtgatggatgtccctgaaatgagggtaaggttctggggctcaggaaggtctccaggcttggattagagataataattaccatatcacagatgactaaaagagtctcaaagcacatcagcaccccccaacctgttctgcttcttggttcctcattttggtgacatctccattgctagaaatggacactatcacatgtcctgcatttacccctttatatacctcttttttttactttttttttttttgagacagagtctcactgtgtcacccaggctggagtgcaatggcaccatcttggctcactgcaacctccacctcccgagttcaagcaattctcctgcctcagcctcccgagcagctgggattataggcgcctgccaacatgcccagctaatttttgtattttgtatttttagcagagacagggtttcaccatgttagtcaggctggtctcaaacccctgacctcaggtgatccacctgccgcggactcccaaagtgccaggattgagacaccgcgcccagcctaatttttgtatttttagtagagacagggtttcatcatgttggccaggctggtctcaaactcttgacctcaggtgatcccccagcctcagcctcctagagtgctgggattacaggcgtgagtcaccgcacccaatcccacgtctgtcttttaatcaaggcatgctctgccttcaagtacaccctccatgatgtctgccagaaatacctttcaggaaggcagctctgaagggcatttgtctactcaaaaatcctaggtagacatttacattagttcaggggcttttggtaacctaaaccagaaatcttgaactcaaatgcccactgtggccatgcaggaaacgtgagccaagtgagtggagtatctgtatataacacatgagattgtctttgttcccacaaaaagatatacttggtctttcttttcctgaaacacatgtcatctcagcctcttttgttttcctgcttttaataagatgtagaaaacagttgtgaaagcacaatgataagtagcatctgaccctcggcctgtgctggggaggctgtcagggagtggcagggactgtggtgaattagagagcacatgttctttcaatggcggggtcacagttcgatggctacgtagaaatgctgatctgatttcccaaaagaaagcaaaaatcaggattcttatggcaaatctccccatttttgacaggcaaataattccaagcttttaaaaagcaccgtgtgagtcattctctcataccactggtgggtgtctaaatcagtataatctctaaggatagaaatttgacattagctactaaaattgtaagaacaatactctttaacttgacactcccacttctggtattcttcctgcatatacacttgctgtgtgcaaaatgatgtgttcaagaaaatttattgcagcattgtttgcaatagtgaaaaaactgaactcatctaaatgtctatctagggggtcttggttaaataggttatattcgtaaaggaatatcatgcagctgtaaaaatgagtgctttttttttagatatgacaatagcacaagtgacaaaagacaaaacagataactggacttcatcaaaattaaaaacttttgtggaacagaggatgttatcaagaaagtgaaaagacgatctgagaaatggaagtaaatatctgtaaatcatgggaagtaaatatctgtaaatcatctaataaggtaatatctgtatctgtaaatcatctgataagggacttttgtttagaatatataaagaactctgacagctcaacaataaaaaggcaaataatccaattaaaaatggacagagggctgatgcggtggctcatgcctgtaatcccagcactttgggaggctgacgtaggccgatcacttgagctcaggagttcaagactagcctggccaacacagtgagaccctgtctctgctaaaaatacaaaaattagctgagtgcaatgatgtgtgcctgtagtcctagctacttgagaggctgaggcaggagaatcacttgagcttgggaggcggaggctgcagtgagctgagatcctaccaccgcactctagcctgggctggagtgaaaccctgtctcaaaaagaaaaaaaaaaaaggtcaaaggatttgaatagatattgaacagacatttccccaaaggagacaaatggccaataaaccgtgaaaacatccttagtcattagggaaatgcaaatcaaaactacaatgacgtatcacttcacacccactaggatggctataattaaaaaataataataataataaggctgggtactgtggctcatgcctgtaatcccagcactttgggaggctgaggcaggtggatcacttgaggtcaggagttcgaaaccagcctgaccatctctaataaaaatataaaaattagctggacatggtggtggggacctgtaatcccaactactcgggaagctgagggagaagaattgcttgaacctggggtgcagatgttgcagtgagccgagatcgtgccagtgcactccagcctgggcgatagagtgagactcagtatcagaaaaagaaaagaggtgttggtgaggatgtggagaaatcggaactcttaaatattgctggtgaatttgtaaaatggtgcaactgctggagaaaacagcttggcactttctcaagaagttaatagtttaccatgtgacccagcaatcccactcccaagagaaaggaaaacatgtccacaaaaaaacttgtaaacaaatgttctcagaagcattatcataatagccaaaaagttgaaacaacccaaatgttcataaactgatggataaacaaaatatggtatatctaaacaatgcaatatatttggccataaaaattagtgctaatatgacaacatgaactttatgctaagtgaaataagccaaacacaaaagactacacagtgtgtgattccattagtatagagcatccacaatacgcaagtccatagagacagaaagtagttcagtggttgcaagggctctggtgaaagaggaatgaggagtgaccgttaatgggtataaaccaaaaataaaattagaaggccctttgcaaccatctgaatggactccctccttggccagcacaccctaaaatttaacctgaaagactggttcaggccacgatgggaggtgagagttggacatgccttattatacccctccaacattaacatcaacactgaccttaagtctgataagaaatatttgtctattctctctatagcctgctactgggaggcttcaactgcataataaaacctaggtctcctggccaggtgcagtggctcacgcctgtaatcccagcactttgggaggccgggagcaggggggcgtggatgacttgaggtcaggagttcgagaccagccaggccaacagggtgaaaccccatctctactaaaatacaaaaaaaaaaaaaaaaaaaaaaaaaaagccgggcttgatggctcatgcctgtgatcccagctattcgggaggctgaggcaggagaccaggagggggaggttgcagtgagccgagatcgcaccactgcactccagcctgggcaacagagtgagactcactcttcaaataaaataaaataaaataaaataaaataaaataaaataaaataaaataaacaaccaaaaaaccctaggtctccacaaccccttatcataacccagatattcctttctatagataataactcttgtaaccaactgccaatcaggatatgtttaaatctacctgtgacttggaagcccctcccctttgagttgtcccgcccttccagaatagacattgaacagacatttccccaaaggagacaaatggccaataagcacatcaaatcaatgtcaatcttgcatgtattgacttatgtattatgtcttcctgaaatgtataaaggctgactatgccccgaccatcttgggcacatgttgtaggacctcctgaggctgtcaccaccatgtccttaacattggcaaaataaactttctaaattgacttgagacttgtctcagatacttggttcacataggtttcttttaggggcgatgaaaatgttccataaaccactctacctaaaattaggtagtgatgatggctgctcaactgtgaatataccaaaaaacactgaattgtacactataaaaggatgagttttatggtatgttattaaaagttgtttaaaagtgagggacccctccagttattgatatggaatgatcttcaggaaaagagcataatatgctacatttttgtacaccaaaggggaggtaggtacgaatatgcatacatattgcttttttctagaagccgcctaggagtgaaaccaaaattcttcacttcttttcggccctacctcgagctccctttagaaaacctttccttccagctcacagtatccaccatgtccaccttcgcctcccggcactgagccttagaggggcggtgctccataaacatttgctacatgaatgaacgaataaactatcggattttggggtgggtcgggacagctcggttccagcgagggctccgcccacccgcgggctccgcagaggagcagaggttgggcggccgcctcggttaactccgctgcagcccaaagcacgggaatcgcgggacagacaaacgagcggagggaagatacctagaagccaggaaaccgcgagctgcagtccaacttggccggaagctgcggagaggctcagccaccggaagtcagtggagggttcggccggacgctctagaatcccggaggaccgggatctctgtggttggccgtgacgggcaccctctaccggggatgacacattcccagagctcctgggaccaagcaaatggcggacacaattccctgggcggaaggggacttcgggagccagtagccaaggtaacagtcccagacctgggcatctcaggccgggcagttccccgagctcacgggactagctgtgattggccggatgaggttgagagcttcatggggacgcgcgcgctacgtgcaggggcgttgccttccattcacttggcgcccgactgccagtgcgcatgcgtttgaaggcggtgcagggcggggagcacacccctgcgaagtgccgggcaccctttgggcggctcccgccggcgagctggacagcggcgcgcgccaggcgtggctttctcggccggtgggctaggattggacgcagtaggtagaaggggcaggaccctccgcagcagtagctcagcgattggccaggagctggagggagcgtggccttgggaggcggggcggagggggacggacagggcagctcaagacgctgaggtggtggctgcggcctttgaacaagtaagtgagccaccctcggagacccccgcgctggggacgggaggccggcgagcctcgggacctctgaaagccttgaggaggcgcgggggtgagtgcggccctgaggaaacccaggtgccccgcccctccctttcttcctggcccgcgcctcgcctacccctcccccgaccctggcgggcccccggctctgggcccggacccctggggtagctagtctgccacgaaccagccgcgcgcttctgcccttgtcggtttaggaaactgggaagttccctggtcctgctccccagcccgcagaggggacactgaggcccacggtaggtggtcctctcctcacccgagtctccacacagacaccatggccgagcctctgaaggaggaagacggcgaggacggctctgcggagccccccgggcccgtgaaggccgaacccgcccacaccgctgcctctgtagcggccaagaacctggccctgcttaaagcccgctccttcgatgtgacctttgacgtgggcgacgagtacgagatcatcgagaccataggcaacggggcctatggagtggtgtcctccgcccgccgccgcctcaccggtgagcttcctgagccgtcgcctcccagatgtggcagcgtcgcagggagtgggaaaccggcctgtcccagacagccgggaaggaaagcggggtgcgagttctggctccagtcaacacacactgaccagggccttctgcctgccaggctccggggaggctcggttctctgaaactccggcctggtggttttgccatcctgcctgcctacttcctccttaggaaaatgatagtcccagttagaccagaatggagagccagtccttcgtgtctaagagagaaatgtgttctggagccagacactggcataaggaactggtggtgggatgggtgaggtctgagatggagagggtgtaggcataagaggctgagctacaccactgggcatccgtgcaacctccaacaagttactaagccatatttccttctctttaacgttgacctattgggacctgccccgcaggggagttgtgaaggtaacatttaataatgtaggtaacatgcttagcacagggcttggcacatagtaggtacccaatacttggtagctgttgtcatttgcatcctagaagggaggtgttgataggggctgagtcgactctgcagtttctccaaggtatcctctggtatgtcccttttccctgctcctcaggccagcaggtggccatcaagaagatccctaatgctttcgatgtggtgaccaatgccaagcggaccctcagggagctgaagatcctcaagcactttaaacacgacaacatcatcgccatcaaggacatcctgaggcccaccgtgccctatggcgaattcaaatctgtgtaagaagcgggatgggagagggagccagacttgggacttttctgaaggctgcaaccatgttgccgaagttctggaaaggcagctgaatctaatctgaagcaggctgggaaaattcccgcagttctaggaccagttctttagagttttgccagggacaactgttattcctcaagaagtgtacagatgattttacagttttatagaatcttagtatataggatgtcaaatgtaggacattcctactatgaccacaccctcctattcccatagcagacttcactaatcaatcacagaacactttcctacagacagtggacaagcctggtcaattttcatcatagttcttcaagctgccactaccaaacaatggagatagccccaaaaggaaacctattggccagccctggtgtagtccaaccccatcttttatctgatggggaaactaggtctggagacaaaagtgatttaaccaagttcatggaaaagtcgtagagaatctaaaacgtgatgctcttcttccataccatgccgtcagcccctatggggtcccagggtaaggctgttacctgtctggaatcggaagggtgtggtgaggatggggcttgtccctggagtgtgatcaggccaacccatgcttctctccttccttccccttccagctacgtggtcctggacctgatggaaagcgacctgcaccagatcatccactcctcacagcccctcacactggaacacgtgcgctacttcctgtaccaactgctgcggggcctgaagtacatgcactcggctcaggtcatccaccgtgacctgaagccctccaacctattggtgaatgagaactgtgagctcaagattggtgactttggtatggctcgtggcctgtgcacctcgcccgctgaacatcagtacttcatgactgagtatgtggccacgcgctggtaccgtgcgcccgagctcatgctctctttgcatgagtatacacaggctattgacctctggtctgtgggctgcatctttggtgagatgctggcccggcgccagctcttcccaggcaaaaactatgtacaccagctacagctcatcatgatggtgctgggtaccccatcaccagccgtgattcaggctgtgggggctgagagggtgcgggcctatatccagagcttgccaccacgccagcctgtgccctgggagacagtgtacccaggtgccgaccgccaggccctatcactgctgggtcgcatgctgcgttttgagcccagcgctcgcatctcagcagctgctgcccttcgccaccctttcctggccaagtaccatgatcctgatgatgagcctgactgtgccccgccctttgactttgcctttgaccgcgaagccctcactcgggagcgcattaaggaggccattgtggctgaaattgaggacttccatgcaaggcgtgagggcatccgccaacagatccgcttccagccttctctacagcctgtggctagtgagcctggctgtccagatgttgaaatgcccagtccctgggctcccagtggggactgtgccatggagtctccaccaccagccccgccaccatgccccggccctgcacctgacaccattgatctgaccctgcagccacctccaccagtcagtgagcctgccccaccaaagaaagatggtgccatctcagacaatactaaggctgcccttaaagctgccctgctcaagtctttgaggagccggctcagaggtgccttgtgggcaggtcgggtgggcagaggggagacttggacttggacaaggcttcaggcttttaccttctcccctgcccaacttccccgcagatggccccagcgcacccctggaggctcctgagcctcggaagccggtgacagcccaggagcgccagcgggagcgggaggagaagcggcggaggcggcaagaacgagccaaggagcgggagaaacggcggcaggagcgggagcgaaaggaacggggggctggggcctctgggggcccctccactgaccccttggctggactagtgctcagtgacaatgacagaagcctgttggaacgctggactcgaatggcccggcccgcagccccagccctcacctctgtgccggcccctgccccagcgccaacgccaaccccaaccccagtccaacctaccagtcctcctcctggccctgtagcccagcccactggcccgcaaccacaatctgcgggctctacctctggccctgtaccccagcctgcctgcccaccccctggccctgcaccccaccccactggccctcctgggcccatccctgtccccgcgccaccccagattgccacctccaccagcctcctggctgcccagtcacttgtgccaccccctgggctgcctggctccagcaccccaggagttttgccttacttcccacctggcctgccgcccccagacgccgggggagcccctcagtcttccatgtcagagtcacctgatgtcaaccttgtgacccagcagctatctaagtcacaggtgagagggaggcccaggccatggggacacctgggtctgggccaaaggaaaatgggttcaggaagcggtcagtgttccacaaaaactgagcagcagatggggctttatctctgaacgtgtcctcttgctcacagaaggagcataatggcaatgaagaggttgttaggagacaagttaaatatggcctgcaaagtgcctagcccagagatggggccagccagcactcactgactgccgagactggtgttagcactcccagatatccaggcggagtagtcagcagcattgggacagggtggcctacagacctcagtctgtctgcattgtaacctgtcattccctgcaggtggaggaccccctgccccctgtgttctcaggcacaccaaagggcagtggggctggctacggtgttggctttgacctggaggaattcttaaaccagtctttcgacatgggcgtggctgatgggccacaggatgggtaaggtggctggactgagctcctagactgggactgtggggagaggttcctggtgcaggagacatgcacctgtgggatgggtgagggtccagcctaggctaatagcacccctccctttccttcccctgcagccaggcagattcagcctctctctcagcctccctgcttgctgactggctcgaaggccatggcatgaaccctgccgatattgagtccctgcagcgtgagatccagatggactccccaatgctgctggctgacctgcctgacctccaggacccctgaggcccccagcctgtgccttgctgccacagtagacctagttccaggatccatgggagcattctcaaaggctttagccctggacccagcaggtgaggctcggcttggattattctgcaggttcatctcagacccacctttcagccttaagcagccacctgagccaccaccgagccatggcaggatcgggagaccccaactccccctgaacaatccttttcagtattatatttttattattattatgttattattacactgtctttttgccatcaaaatgaggcctgtgaaatacaaggttcccttctgcacctgactccaggtgtaatttttggagttcggggtaggacaccatcagcaggggagcaaggaggagccaggtgcctacatttgggggataaacaaatatgtttgtgtgtatgaagccagttcattcaggttctgaaggtttattgagaccttcagtccctacccactcccagccctgcagagattgtcctctgctccctcatgtggctaaacctctcaacacccagagggtatggggaagacctcatatgcatgcctaccttggctgtggctgtttcagggtggtgtgcggtagctgtgttcttggcatagagcttcaggggctgggatgggccatcaggggaagctgagtatgatagtgaggtgggctggggttccacggtactcaccacaggggagtaagttggtgggagggatgctgaagatgggacatggtttgagagcagcccagaggagtgctgggctgtggcctagaatacaccatgggccctgttcacactgcactgctcagcttagcacactagggtggcccagacaggggtccacagtgaggaagcaggacaagatggaccacaaaggcctgcagctgggagagtggctcctggctgtcagctgttgggacaggttggaggcaactcattctcatggagcccagccaggtccaggctagaaccatgtgcctctcggaagaggcctggggaactgctggcagtgtaacttcaggtgtaggggagccgggtctggcttaggaatggatgccctgggtgtgtgacagggatgtggcatggctgagagccacaaggcccccttgtaaggagttggtgctcgggaatcagcagaagcatgcatcaggggcagcagagggagcactcatggagaccatgggtgtccaggggaggaaaggtgcctgagggggccagcccttcaggcccggcggattttcatctcagtgcgtttgagggagtagtagaagcccttccactgggcccagttgatgccattggcataagagaggtgggagccacctaggtagaagccattgaggttggcaaagtggcagctgcggaaccagaaggctcctgaggagagagctgcgcagttctgcacaaagaggtcctggtcccggtcgaaggtagagaacttctggccactgtggtaggacagggagtcacctggcagaggagagaagggttggggctgctgaggcagggaactgagccccgagctggccgggagagggtgacaatgacgactgtgagagatatcacgtggcagcctggcgggatgggggcaccctccctgagccagatgttgggttgatgtgcttctgcaatgaagagaaacagctgctccaccacagagttgcctggagcagggccaggatggctgctccccagggctgaggcccaagctggtttgagcttgtttggagccagctgtggcccttccagatccagaagggttgaaggaggggcctgaaggaggttggggctgactgggcagggccagccctgccttctttcccctcacagcccctcccaaagctaacagcgggttatacctgccccgccatcctcaaagcctgccacaaagagggtgtagccatcctcctctgcgctgaccgcgttcggggagatggagaagtcagcgtacttggcataggccgtgttgttctcaaagtcctccaagtccactcgcagctcatacttctgcttcagtgtcaggaggtgcatgttctgcagccctggggaggaggggcagctggtcaacaaggacctggccctggggcagcccctcagcccacctggtccctgccttacccagccagtactctccatcagcacggccgaagcccagcttgtagtcattccagccgcggaagaaacttactgagccattgaatctcttctggaaaacctggagcagagaagatgagactggatcatcaagggtccaatgggcaaggttctggtcctgccctgcccacctcaagcatggaccctgtgatgctgtggccagtttgttaaaggactgggttgggggtggggagggtggtgggagtggggttgctaaaacaacgtccacattggcaccaggccccctgtggagcagttgccagcacccacctgggctcttcatacccagtttcgtatagaggcaggaaagaggctaagagggaggcgttctagagttcgagtgcctagctgtgggatctgggcaagttacttcacctctctgggctttagttcctcactacttcccaggattattgtgaggcttatgtgcattaacctacctcagctgggcgcggtggctcacgcctgttatctcagcactttgggaggctgaggcgggcggatcacctgaggtcaggagttcaaggccagcttggccaacatggtgaaacctcatctctactaaaaataaaaaaattagctgggcatggtggcacatgcctgtaatcccagctactcgggagcctgaggcaggagaatcttttgaacctgggaggtggagtttccagcagtgagctgagatggagccactgcactcaagcctggatgacagagtgaggctccgcctcaaaacaaacaaacaaacacctacctcaggcacttagaattaagcgttggcagctgctcagaagctgtgctgtgggtatcattatccccattttaaagatgaagaaactgaggttcgcatatgtgaagcccagggtcacagggctgggattagaaccagctctggcctctgttccctcctcccactcaccgtccacttcccgccctcggtggtcatgtcacagaagacgggcacaggcacactggggcccgaggggtagatgaggtacacgccgtctgactggtagccctgggcatagatgtcgtcacagtccaggggttgctgaaggcaaaacctctccagagctgggggtagggacatggggacagtgaggagagtgggactatggcatcactgacacctcagcaccccaaggtttgcctcagtccctggggctgggggactttgacacaaggagtcatggaagatttcttcaagggagatgagcaatgcttatgtcatccatctgccccattttgtaaaggaggaacctgagtcctgcagagctggggctcggccctgacagtctgttctgacagtccagcctcttcttgcacaacctgtgggccaggccgcgtctgtgagtgtggggctgcttaccatctcctcggatcccggagacctggggggcacacgggggcgtggagagaagcagcagcagcggcagggccaggagtgcctggcgatgggcagacagggtcagcacagccccttcccagctccagagatcccctgttctctttgcatttgcccccaccatgcatgcacatactgcccttgcctgaatccctctcctgctatttggcccctcttccctgcccccccaccccgcccgccaagtaaccccactctctgggacgctgtgtaccctcatagcttacgagtttcaagagaactccttgtgccttcatagtgccctctgtggccaggggcctctggagtgggctcagttcccccatgctatgagtcccccgaccctgggccccgtaccttcatgctgtcagttctgctcagagtggctgggtgtctgcggccccagactgcaaccgcccagagttatgcgctgggcccccgccagccgccccagccccgccccccttcccgtagctgcagaacccccctctccccaccccagacaaccagcatcagtttacactatcagggggctgggaggtggggctggagccaggggaccacctgtgtctcattagtcctgtcgggcaaagtactgcagacgttaactccctgctggctccaactgttccctggatcccactccatccgctatccgccatctgccacccaccctgctagacctgtgggccccctggcgcccccaggcagccccagcccgccgcagcctgccccctacttcctgatgggcccccctgcagatgtctgtttattctttcccctccttccctggcctgtgtttcatcagccattgagggggagggctgagggagagtgggggtgtcatatgcctggcttctggggacgggaggcctgctctgggggagcagaaggctgaggggacagtttcagagctcctgatgtgggagcctggctggggctggtggggggacagaggcagcagtttcttggcaggcctgggacatttctgagccatgagcacaaggctgctggcgtccaactgctctgtctgccccagctcaggccagggcccctctccagtccccctccccagcccccctcactctggccacctcaggcccactcttttcccctcccacagttccctggcccatctggctcacatgcaataggtatgggacctcttttgtttctcctcactccacccctcctttcttcttccaaacccttcactttggctcccacacctcccagattcatctgaatctccctacttctgggctctctcctcctatccttggcacactaccaggagagttgttctagatggcctctcagattatgtcaccctgcttaaagcctcatggctccctattgcctcagggctgaggctaggtttctcaccttggacatgaaaggaatttcaagtctgtctctggcctaccttgaggaccttgtcccttattgctgtgactcataaactacagtgcagccactccagacttttcaccatggaggtccccactcttttgtgctgctccttgtggtgcccgctcatctgcctccttttgttggccataagggccagtgagcagggtgtgtgtctcatttctgcatgctcagtgcccatcacagagcctggcacagagtaggcttgatatgtacatgcacagtcacttacgtatttatatctatatatagataagatactagagtcagggccttgccctgttgcccaagtgcaatcatagctcactgcagcctcaagctcctgggctcaagtgatcctcccacctcagcctcctaaggagctaggactacaggtgtgccaccacacccagctaattttttaatttttttgtagagatggggggggtctccctatgttgcccaggctggtcttgaactggcctcaaatgttcttcccaccttagtctcccaagaagctgggactacagggccagcacacctggctcacagatatcttttgagcgctgtgtgctataggctatgctggctgctgaggatacagtatctgccccacaaggagtggcaagcacaggttttggacagtgaattgcaaatgtaaggtgtattacaaaaggacatttgtgttgaatggatgaacagatgaaatattcaaaggcaaagtgatgaggcagctctggcttaggtcccatctctccactcctgagtcaatagataagccccttggcaaagccccagttggcctccctgacttggttctgtgattgcctctattcatagttgtgtcttgtgtcaggctacctcagttcaaatctagattctgttgcctgttagctgggtgaccttgcaaaaattacctagtctctctgtgccttggtttcctcctctgtaaaatgaggatagtcatagtatctacttcataggggtgtggtaaggattaagtaatacatatcaagttcctaaaacagtgcctacaaatggcagctatttagtaaatattagctatcgtcatcgtcatcataaacatcatgattctcatatgaatgggttgtcttcaacacagcttgtatgcttgcctgtggaagagacagttggctggctctcaatactcgttcttcccttagtcctcagtagtaagatcctgatttttatctgggctcattgtccagcctcccttgtagctaggtgaggtcacacatctgaattttggccaacaagatgccaacaggtatgttgtaaaggtaggtggcttgtccctcttcatcctgccctctgtcctgctggatgtgatggctggagctctagctgccaccttggacagtggggatgaggaagatgaggcctcatcagggaatggcagaggaggaactggcaaagcctctcacgactttgtggagtcggtacaaaaacagccctggactgccctcctctaggccttttttatgcaggagagaaagaaacttctatgtattttaagtgtctgttgtttttttttctgttacacacagctgaatctaatcctgatctcttctttcagcaaatgccagctaattttaacacaagtctataaaagggaaaataatgaaaaaaaatcagttatcaaaacaaatactaaaatggtccaaagtcaagtattgaagacttttggagaataccactaatgagcaaacatagaaactccttctccccctagaaaagagagaattaagatacgaggtatcaattacattttgccaattagtttttacttaaaaaatgcaataatgtgtgtgggtgcagcaaagcaggcactgtgttcactggatgtggctggaaattagtttaacttttgtggtaaagaaatttggtaataacatgcccagagtcggtaatccttctaaggtgttgtctggaggaaatactctgacatgttgaagaggctacagatacagctgggggacattacttgttggctgcccagcatgggaaacctcttcccacatttggggtgttcctctcctaactagaatgctgggtgttcacatttccagggttccttgcagtttgattgaaggcacatggccttggtttagctgataaaatgcacggtcctgggcttcattttgggagaaagtgatttgagaagcagaagcaggaagaatccattcctggggcgatggtgaccccagtgctgtctgggtcctagtttctctgggtggttggtggtggcttggcaagcacagtgctgagtgacactggcttaggcttaggctgcaaagccctgagcttggttctcagccctcccagtgatcagtttgctctgcctgctgatgtttttgaaagagacccccaactcacatgcataaagatgtttgtgtctagattctgtcattgccaacaacagacactaactctgactttgttgggaggctttgctgggagtctagactaggggtgggtgggagctgaggctgccctgggctctggaaagcaggccctcagtgggggtcctgtggtgggacaatgttgggttgatgctgctcaatgcacatggctatggctttgtctgtctgccagattccaggagtgaggagggtccatcccattggccttgcttgggtaattttatgcatcccttggcaaggggagtgcagttggacacctttcatttgcctccccacctttctccctactgccctgggccccggaaggccagcctcaccctctggtttctgattgggtccagccaatgaggagcttatcaggattcagcgggaaggagaatgaagtaggaatattcattcccctccttgtagagtccccacacactggttttgtttctcagccaacagtctcaagtcctgccaggtagccatctccatacagcctcctgactcactgtgggtgactccttcctcctctgcccgcttcaggtctaggggtgttgacagccctggtgttaccagcccagagatagggggccatctcctgcttacacctcagcaaatagtccttttattaaatgctactcaaattgtcctaacctgagtgttacttgatggaaactggactgattcagggagagaggcatccctgactataatacagaaaacgagtgtgagactaggaggagaagtggctgcaagtgtacaaaaaagtctccactaaataccctctgtaatagtcattgtaatgtatgctgtaatattgtcaaacccagatggctcagtaaaaacagatgaccccctgtgcttcctcgatgtcattttggtaagacatttgctcaagttggtatggcttccgcccctgggttaggcctgtgctggttgttctctgcgttccctgatccacccacatcctcctctgtgcctggtgtgggggctgccctgtagggaggacatcgctgggtttccatggcccctggcttccagctgggtttgactaatgggagacaccagcaggagatgggagaagagagaggttgaagtatttctcccagctcctgtcctgatgagcactgcagttttggccgtagctgtgcccgctgtccctcccgcccctcccccccacctcctgatgacatctcctgccataacctccctcactgtctccagtaaccctgtttcctccccttgccccttaggctgggatgatgagggctgtcatccttgctagccccaggatgcctcaatgccccatgttggttttcttaatgttcacacccaagtaaatagtcccttcattaaattctctgaattaaaaaaaaaaaacccaaacagctgagttcaccctttgtttcctgagaggaccctgactgactcaaggtcttactttggtttcctctaaaagcacagcagcctgtggagtggagcattttctgttgttttggacaacagctaaggacaagacccctattctctctgcaggtgcagacacctccctgtgtgtcttgctggcaggcagctagactgctcctttatccaccctcctgtatccggagctagagaagcctgaggagagtttttgaaggaaactcatcaaagcagagagcacctagggagaagagatggtgggtccccccaacccaggccaagcaaaggggctccaagaaagaggagctgtgtgccagaaggacagacttgggttgacaggctgagctgcccaaacccaagggccctttcccagaggccgctgctgcagcaaagtgagaacgactgtttggaagacgggtgaagcctagggctacccgagttggagaggagagggggcaggggctcgcacagtcatcatttggcaggacacagatgtggtgttccgagtgggtgctgtggaatatgaggtcagattggaatcaggcccatcctcgtaacctcattttaccttaactacctctttaaaggctgtatctccaaatatagttgcattccaaggtagtgcatggtacagcttcagtgtgaatgttggggtacacgattcatcccataacaagcatcttagaagcaccaggcactctttaaccctttataggcaaccgtgcacaagacagaatctccagccctcctggagctacagaagagaaagaaaagtaaagtgaaatgataagtactatgaaaaatgaagcaggaaggtagcaggagtggggccaaagtttggaacagggcatgtccagaaggccgtagtgtggagatggtaatggcaaactctgtgtccaagggcagacacagacattttgtggtggggaacactctgtcttatttctgtaacatgggggaaggttttaggagggatttagtgtctctccccacctttttatagtttgggacaagatcagttgatggagctcaggatgtggcagagagaagaggcagattagagatggggagggtgttgaatgtaggctaaaacatttgaacttgatcccaagggcctttgggattagggtatattgagataatgtaacttaggttcctgattttactttgatgtgtagatgctacataactggggagaaagcatacagattagaggtctttttgtgtttaaataaacaaatgcatgtgtataattgggataagaggggtacttggaggccgtttatggagaaacagcagtccctagccctgtgtttgatgagtcctggggttgagtctttcattgtgctggccagcgagtggaggtttgtttccttcagttctgagaaaattcttttctattacttctttggctatttctttcctcccttttctctgttctgtttgtgataattttattagttggatattgaatctcttaaattgatcctgtattatatatttccctaaaaatcctctgtgctctgccaaccatctcttcctccccctaaccccctggcaactactgaactttttagtgtctccataattttatcttttccagaatgtcatatagctgtaatcatataataatttgtagccttttcagattggcttctttcacttagcaatatgcatttaagtttcctgcatgtcttctcacggtgtgttagcttacttcttttcaacactgaataatatgcaattgtctggatgtaccacagtttatttatccattcacttaataaaggacatgttggttgcttccaggtttgggtgattatgaataaagctgctataaacatctgtgtacaggttttgtgtggacatacattttcaactcacttgggtaaataccaaggagcatgattgctggatcatatggtaagactatgtttagttttgtgaaaaactgccaaactatcttctgaagtatctgtaccattttatattcctaccagcaatgaatgattgctgttccatatctttgccagcatttagtattgtcgttattttttacttttagtcttatatgtatgtaatgatgtcttgtgattttaatttgaattatttaatagcaaacgatgttgaacatcttttcatgtgcttgtttgccatctgtatatctttttcagtgaaaaatctgttcatgtcttttgcccatgttcttttatttttgagacaggggcttgctctgtcacccaggctgggtgtagtgatgcaatctcagctcactgcagcctcaacctcctaggttcaggccatcctcccacctcagcctcccaagtagctgggactacaggcgtgtgccaccatgcttgtctaatttttgtatattttttagagacgtggttttgccatgttgcccaggctggtctctaactcctggactcaagcaatcctctggcctcagcctcccaacgtgctgggattacaggcatgagccactgcacccgctcccccaacccatgttctaattggacaatttgcttttttactgctggagttttgagagacctttatgtattctagatactagtgcattgtcagctatgtggtttgcaaatatttttacccattctgtggcttgtctttttatcctcttaacagggccagtcttttatagagcaaacattttaaattttgattaagttgaattaatcaactttaatggattgtgtttttggtattatatctagcaactttttgcctagtcctaggtcccaaagatcttctatttttttctagttttataattttacatttaagttggtgatccactttgagttaatatttatagaagtcaagttctttttttcccccttctttttgtagattccttaggattttctacatagataattaggtcatctgcaaataggggaaagtttatttcatcctttcctatttgtatatctgttatctccttttctggtcttactgcactggctagaatttctaatcctgtgttgaataagaatgatgagagcagatattgcctcgttcctgattttagcaaaaaagcatccaaggccaggtgcggtggctcacgcctgtaatcccaacactttgggaggctgaggtgggaggatcacttgagcccaggagattgaggctgcagtgagctgtgattgcaccactacactccagccacggtgacagagtcagaccctgtctcaaaaaaaaagaaagcaagcattcagtctttcactgttaggaataatgttacctgtaggttttttgtagatgctctttatcaagttgagaaatttcccctgtattcctacttttctgacaatttatcattcatggggtgttgaattttttcaaatactttttccacattgattgatataatcctatgggttttcttctttagcctattcacttggtgggttatattgattgattttcaaatatcgaaccaatctctcatttctagaataaattacacttggtcatagtgtagaattatttttatattgctgaattctatttggtaatattctgttaagaatttttgcacctattcatgaggaatattagtctgaacttttttttaagtaccatctttggttttgatacagggtcataatagctttgtaatgaattgggaagtatttccttctctttccttccgttttctggaagatattttatataactagttttaattcttttttttgtttgtttttttgaaataggatcttactctgtcacccagactggagtgcagtggtgtgatcatggcttcctgcagcctcaccctcctgggctcaagcaatcctccgtccttggcctcccaaagtgctgggattatcggcatgagccactgagcctggccctgtgttaattcttttgtaaaagtttggtagaattcttcagggaaatcacgtggggctggagattttttttttttcctgagaaatattgtgatacatcttttaggcctccatggtttttcaagagatgtttgttgtcatttaaattgctttccccctgtaaataaagcatttttgcctaggtgctttatatattattttcttagtttttagttttcagaaatttataatgtgttttgccatgaatttttgggagttatcctgattaggatttggtcactcctttttttttttttttttttgagacagagtcttgctttgtcacccaggctggaagtgtagtggcacagtctcggctcactgcaagctctgcctcccgggttcacaccattctcctgcctcagcctcctgagtagccaggactacaggcacctgccatcacgcccagctaattttttgtatttttagtagagacggggtttcaccatgttggggtttcaccgtgttagccaggatggtctcgatctcctgacctcatgatccgtctgcctcggcctcccaaagtgctgggattacaggcgtgagccaccgagcccggcttgctcacctttttaatctgttgttggcttatgtctcttgtcaaatttggggagttttcagccattattgatttgagtacttctttttgcctcacactccttctttcctctaaggactccagtgacacaaatgttagatctttgttgtacgatagttccccaggtccatgagtctgttcatattttttccagtcttttttctctcttttgtcagattaggtagctctattgttttgtcttggaattcactgattgttccctctgtcctctccattctgctcttgagcccatccactgaggtttttattttgattattgtattttttggttttaaagtttccatttggttctttatagctccttcttttttttttcttttacttttctttctttttttttttttgctgaggctttctatgttttcatttgtttcaagtgtgtttgcagttgctcattgaagcattttatcacagccattttaaacctttgtcagctaatcctgacatcccagtcatctcagtgttggcatctatcagttatcctttgtcattcagtttgagatttgctggttctttatatgattaatactttttgattgaaacgtggacattttgtattatgttatgaaacgctgggtcttatttaaacctgttttttgtttgtttgtttgtttgtttttttgagactgagtcttgctctgtcacccaggctggagtgcagtggcgtaatcttggctcactgcaacctccacctcccaggttcaaacgattctcctgcctcagcctcccaagtagttgggactacagggacatgctaccatgcctggctaaattttgtatttttattaggttggtgcaaaagtaattgtgactttgccattaatggcaaaaacacttacttttgcatcaacctgatagtagagatgggctttcaccatgttgcccaggctggtccggaactcctggcctcaagtgattcacccaccttgacttccctaagtgttgggattacaggtgttggccaccacacccagcctaaacttgttttagctggcctctgacacccctctggccgggaaaggggtggcactgcctcagtaccgccaggtgggggtagaagtccaggttcctcagtttgcttctgttgacacttaagagggggattccctgttactgttggacagggtgcaagtttcagctccccacgtggtctccactaacactgcaaggtcagggagagcacctgtaatggctgggatgcaagtcctggctcctacttggccttctctgttaccacccagctggggatgttgggacccctcgttactgcctagtcaggaggaggtctagtctccccattcagcctttgtggcatgggtgggtggagctgcatactttcctgtggcgtttggctgcagtagggtatttattgcctaggaattttctgtcttgccaggccgcccttttcctggtcctttggctacagatagcaggttttgttgagggtttttttttgtagtggctgttggcatttccagactgccagcttctccagtacccattctgggataatgagacaaaaagaaagcctaggagagtcgccactgtcctcagtcctgatgtccctggcccgcctgccttcttttctccacctttcagagtcttctcatgtttgtcttgtacgtgatgtcccaggtttttagttgtacttagcaggaagtacaggaaaaaatatacctactccatcttcccacaagtggaagttccttaaaaagaattatgaggcctaagttacatagagtgacgtagaccagtatttacaaatgtgtacctgggaactaccacccagattcctagcaccacagcaggcttcctgtgaggagtgacacatttttatttgcatctgtaaaaaattgggctggctgccaggtggaaaatggattggtgggaggcaggggagggactgatggcctgagtgttctcagacaccatcatctgtccctgatggctcctgtgggtggggtggggtggcctgggctccatgggtcaccaccctcctctttggcactgggtcatcagtcagggtcaagcagtccagggctgcctgatgtgggtggggaacctctgctctttctggcatcagactcattgtcaggaagcagaagcacatttcagtttttgtacaccctctttcctgacctctggggtcagctgttaatttcctgttgcctaactgtactccacattcattttgtcagcaaacatgctgtattatggattgctaaggacatgactgctgtggctgctttgctctgcccggccctggattatggtgttgtgatagggagagcaaatggggttagagagagaggaagaagaaataccatgtgtctgcaagagaaagagacagagagaaacaaatggtagagactagataggagataggcttggctgcaggtcacttggatagcctcagtttcctcatctgtaaaatggagccaatattttcacctttagagaaatgtggggaggatgggagattctgttgttacaaggactcagcatatagtaggagcccagtaaatagacatgatcattattatcattgtaataaactaatggaaaactgtacttctttatccattggatgtctgttctcaggcctactgtgtaaaaagcccttcttctgtaagaatctcttggattttcctttgacaaagaaaaagaggcgaggtcttgtgggggttggtctgagatccaagatggggcaggactgatgcttggggacatctgggcacactgaggtaagtggcccagacttgcttccaaggctgattaacagggtagcattggccgggcccggtggctcatgcctgtaatcccaacactttgggaggccgaggcgggcggatcacaaggtcaggagttcgagaccatcctggccaacatagtaaaaccccgtctccactaaaaacacaaaaattagctgggtgtggtggtgtgtgcctgtaatcccagctacttgggaggctgaggcaggagaatcatttgaaccagagggtcggaggttgcagtgagccaagatggtgccactgcactctagcctggcaacagagcaagctccgtctcaaaaaaaaaaacaaaaaaacaaaaaaccaggctagcatttattgagcacctactattcaccaggctttctgcactgaccctacatgggagtaattgtatcttcagttttaccactgaggaaactgagcttgagtgagagaagtgactttgcctagtgagttgagtggaaccagtatttgaaccaaggcctgtttggtgccacagcctgggtgctgcccagaacgcacataaccttgccagtcaggttgaaggatggcataggtcagtgggccaacagaggcttacatgcagaggcctggactgcagcaggcctctggctccattgtctgcctatcaaaccagctgcatggggctgcctcttactccagaggggtctatgggtcctggatccagttgggcatagtctgtggagggaagtttgctccacaagggccagctggccacatctgtcaacttcctggctgactgcctggatactccagtcccagggtcctaatgggcagtatgcaagttggaatgggggtggtacagcagaggagaggggtctggagcctggtctcgattctgacttggagcaggggagatgatacctaatggtaggttggctgccagcagccagggactgctagccagtgtggacatccagaagggtgctcaaggtgtcttctaacttgactcttatgacttccttctcccctgttgtcctcatcagctagtgcctcccaacttgtatgtcctgcttcgaacctgcctctgaagcccaccttccttcctgtcctcaccctcccaccctcaccccaccccttgtgccccatgcttcatagctctggagaggcagcccatatttgaattttgtctttcccacttttttcaataaatccagcaaatgtttgttgggctaccccaggcctgactgttttcactgttaaagcttcaaatgagatattggtatgaggtttggggaagtaatttaacttctccaattctctgttttctcatctataaaattgtgtgtgtgtggggtagtgggcggcttatatccacctcaagggttgtgagggttaaaaagatggggctccagttatttgggcttggtggcaggcacctgtaatcccagctatttgggaggctgaggcaggagaattgcttgaacctgcgaatcagaggttgcagtaagccaagatagtgccactgcactccagcctggcgacagagcaagactccatctcaaaaaaataaaataaaattggccgggtgcggtggttcacacctgtaatcccagcactttgggaggctgaggcgggtggatcacgagatcaggagttcgagaccagcctgtccaacgtggtgaaaccccatgtctactaaaaatacaaaaattagctgggcgtggtggtgcgcgcctgtaatcccagctactcaggaggctaaggcaggagaatcacttgaatccgggaggcggaggttgcagtgagccaagatcctgccactgcactccagcctgggtgacagagcgagactccatctcaaaaaataaaaataaaaaataaataaataaataaaataaaaataaagtaaagctgtttttgacatggcagatagataactgaaaaactccctgcataagagacaaaaatcatcctttaacatttgtagccaaaatcagcaaagatcaatatgtatgattttgctctgtgttggtgaagatatccttaaattatacttacccaagtggaaacggggtaagaatagtaatatgtgctacagtgctatttgttatagcaaaatgttagcaatgctctagatgtctgtcactagaggcctagctcgaggatgttgtcagtactcaaaagcgcctaatgcaaagtggctgttgaaagtagcaaggtgtctcctccagtctgtcccggtggacgctcagaataatggttcaagaacacaaatctgttcacatgtatccctgcttaaaatagtttatggctccactgacatgcagcaaaaatccaaaaatctgccacatggccctccatcatctgttccctgctgactgaccttggtccccttaccctgcctctatccttccttcttgccagccctcaccctgtgctccagccgcacccacactgaacctgccctgccaactcactgccaggcctttgcacgtgctgtcccctgtgtctggagtcccagccctcaacaacgtttaccctgctaactcccttatcctgcaagactgagccttgctgactcccaagtctgagtgaggggcttcctccaggctcccacatttccctgggcagctcctatacagcaagggatgtgctgcaaggcagctgcttccttgtttgcacatagtctttgagctcctcagggcagggacctgtcaaaagacaaaatgacaataaatttagtttaaagacctaattggcttttatttgaaattttagaattgggcaacacctcattcttataaaacagaatgattatttgacgagctgaacagaggagattggctttacaggcaaaaagggctgaagtaagcagacagaacaaaaagcagactgatttcaaagttactttccttgtaaaagttaaagcagaggggacttcctatcatgctggctaaaagtggcctgtttggggatttggctattatctctttgtgtcctgatttcttggaagatcagataaacaatttagttttggctttgtagcatggaacttcagcatgagtgaatcctttttggtttgatctgttggagcttatccaggagctcaatccagaccaataacctcctataaatcttatttaacagaccacatcttgttatttgttgtagtctctgcatccagcatcactctgggtacatgcttggtacatcggaggcatttcataagtttgaagagcaaaggggaggagagagaaggatgaggaagggttccctgtagaaactctgagccaacctgggcctgggtgatgggtttcatgaaggcaggcagagactggcaagggtgttcaaggcaaggagagtggctggggcaaaggtgtggaggtgtgaatgttgggagaccacagcacacagcaggccagaaaggaggggacggcccgggattgggagtcagggcattttatttcttccagggctgtcattggaaggtttccttagctctctaaacctcagtttcctcattcagaaagcagggctaatagtcactgtattatgagaatcagttgaggtagtagggcacataacaacacattgtgagccctaaattgctaagcaaatgttggataattgtactattattagttgtttcaggatgcctagtaccagattgatgatggggggcttcagaagtaaagctggggagctctgacttccttccagctgctgataggaaggcctggcctttgatgctcacacaaggggacctggcacagacacagctgtggcgagagcaaggagggccactgggcctgggggacaggaggagggcagccacagggagcagatgctgctgcaccttggggccagggtcaggacccggatggggaaggcagccatgttggcatggacaccagctcactacagccagcagcacccagaggccattggttcagcaggacagcaggtgtcccaagccctgcaagaaagcaacgtacaggcatggactaagggatgacaccaagggagggcttacacacctctctgtgactggcccatcacccttacctctcctcgcttcacatgctgcattccaggtgagctgtttatcttgcagctctgtgtctttgcatgggctggtctctttgccgcacatgttgtttgcctgtccccattcctttgcctgtccacctcatattcatccttcagatgcagcttttgtgggaagccttcctaggtgcccaggtctgagcaaggtgcctttgcttgttcctcgtgcatctcccctcactctacctaatcagagaacttaccaccccgtacttgtttattttcctttctgtctccccagtagactggaagcaccctgagggctcatcagtctactcccagagcctagtatgatgtctggtgtattgctcaataaatgtttgtaacatggacagatggatgaatccatgcatggatggataagtgtaagagtagatggtggatgagtagatacacagatagtggaggagtgatggatgaaaagatgtgtgtatgtgtgggtggatggatggagcaaatcatgcatgtgtgcatgcgtggattggtagttggagaatggatggatgaaagaatataagaaatgaggtcaggtgtggtggctcatatctataatcccagcactttgggaggtggaggtgggcagatgacttgaggtcagaagttcaagaccagcctggccaacatggtgaaaacccatctctactaaaaatacaaaagtttctactaaaaatacaaaaaaattagccgggtgtggtggcgcacagttgtaatcccaggtacccgggaggctgaggcaggagaattgcctgaacccaggagatggaggttgcagtgagccgagattgtgccactgcactcccgcctgggtgatagagcaagactctgtctgaaaaaaaaaaaaaaaaagaaaaaaagaaagaaatgaatggtggatacatagatgaattaatggatggataatgagtgcatgggtgattgagtgagtggatggataaataggtagataatgcatttatcttgatggataaataggtagataatcagtgcatgcatggatagatggttggaggaatggagaatgaatgaatgcatgggtgggtgagtgggcagaagataaacaagatggtgactgtgtcttccaaagttcaagtgctggaaacttaatcctcaatgcaatggtttgagagatgggacctttaagaggtgattaaaggtcacctcaggaatggattaatgctgtcacctcgggaatgagttcttttataaaaggatgagtttggtcccctttcctctctctcttgtccctgtaatggcttctgccatgtgatgacacagcagtaagaccctcatcagatgcagtcctttgttcttagacttcccagcctccagaaccttgagccaaatacatttctgctcattataaattacccagtctgtggtattgtgttattgcagcagaaacaggctaagacccagtgcttaccagggcaatgcccacagtgccaggcttcatgaaggccagctcccaggctaagaggtgggagaggactgggggcgttccacccaaagggacctctgatctcattggccccccgccgacattcacacatcaggaaacaggcccagagaagatcaaggacttgcctgaggtcacacagcaagctgcggtcagaaccagtcagaactcagttgcctgtttccaatattctgcatagacagaggctggactgatttttatccccttctgaggaaagtgatggcaaactgagacacagcaaaactacaaactctttccaaggcttattgtaataactaactttatttctgccaccaaacagaccatggaatgtagtggctaagagcttggattggggagcctgatggcttgggtttggattccagctctgccattaatagctgtgtggtgttagacaagtgacttaacctctctgtgcttcagttccctcatctatacaatggaagtgatatagtacctccctcataggttgtgttactcggggtgagcttatcacataaagtgcttggaacagcgcctgttgggtaaggatgtatgatgtgtgcgtgtgcgtgtaaggcagtaagagtgagcccgtgtgtaaatgtccatgagcatgaggcctgaaggtacacacatatttgtgtgtgagtatgaaggagtgagcatgtgaatggatgtggatgtgcaagtgcggttgtgagggtgtaactgtgtatgcatgtttgtgtgtgtgtgtgagcactgtgggtctatatcgggcaaggtggagtcatggatgtgcatgtggcacaatgtgtgagcacagagtgtgggatacatggagtattttgaccatatgtgtatggtatgtgtgaggatttacatggaatagtatgttgggggagggctgaccaggtgtgtgcatgcatgcatgtgtgtgtgcgtgtgcgtttgtgtgtgaagctggctcttgcgtacatcaagggactcagaaacctccccaaacagggttccagtctgtaaaactgtatttttgactcctgaggctggttattccaaaaatgagtccacctccactccaactcccagcctggaagctagagccagaggtcaggaagtcaggttagtggcctgagctgggccgcttgttcacaaggatggaagaggcagagggagagcaggtgctgggagctttcagcttcaggatctggaggccaagggctggatttgggcagagatctgacagggtggatggcatggagctagttgatggtgcagggccagcccagcgtgcgctgggactcccaggtccatactccttgagtctgtgcaaggtctcgaaggtagtgatcctgtctgggtgagtgatggccatattcctggcatttctttgctgggtagaagcacctcacaccaacttggccaatatttgttggtgaatgaatggacaacggatgaaatgagaaataagtctgtctctagggcctgcaattcgctccctcccacagttcaagctccacccccgaaacccaggacctcccctcccaccccaaccctctctgtggactccattctcactcaagtcactgctcagcccccagcagcaccctgagggcctgtccaccttgcaggaccaggcctggcttagtgtggctcttcctgtcccgttgagtccctggggaaggtcagaggccagttaggggcaccatgagaaacctgtgtggtagcctcaccatggttagaaagcaaggaactaggcagagtggagtttcttccattccttttcagattcgctgaggtccacgtggggtagtcatcctcctatgagggccttagctgccaggctcaagaactttgcaggccctgggccctttgactgtcaggaggactctctctaatcagagcaaacacattaaaacacgtggtatccacagcccaggttgagttgaaattttttgccattaatatttttcaaaggataggatcatcttttgataagacacattatttattttgatgtctgaacactttttttttttttgagacagggtctcactctgtcacccatactgggtacagtggtgcaatctcggctcactgcaacctccacttcctaggctcaagtgatcctcccatttcagcctcctgagcagctgtgcaccaccatgcctgactaattgtgtgtgtgtgtgtgtgtgtgtgtgtgtgtgtgtgtgtgtgtgtatgtacagacagggtttcaccaagttgcccagactgttctcgaactcctgagctgaagcaatccacccacctcggcctctcaaagtgctgagattacaggtgtgagccaccatgcccggtcgatgtctcaacactttactgccattactttctctgttttggtcaccctgactcctcagaacctagcactgtgcccagcacttagtaggtgctcagtaaacatttgttgaatcagtgcactcatgacttgaatctgactttacagatgataactcgagctgggtttaccagctaacatcatgtaaggggtactgggacattaaactaagtgggtgttacttttgattttgaaattttctttttgtggtttggagagtctcatttttccattaggtttcaaacattctcatagaccgtagactcaagagactcatggagcataatggataaagcggggctgcccatagacatggacccaggaccaccacacctggcctccctgggccaggggttccccttggggccctagatagcatcagaggcctctggctgcaaaggagcagggcccatcctttatcccatcctttatccaggagcaggcctggtgttcctcccgtctcctatccacctggtcggcctgtaccgtgccttggggaatgccctcttttaggtgcccgggtatgatcccaagtggatctgtatttccacttgtggccttgacttccccagcagcaccctcagcctccccgcttgcccctctagtctgttgtccatacagcagccagagtgggaggggccagcttcccaggtatgcatccagtgcagccactcaaggcgagagctcagaagggctgtgtgcttgggcttcagtgctctggtcaccatcttgaaacaatcattttagcattgaatttgtgctttgtgagtgaagtctgatgggaaaatggcgccttcactgggaattcggaagctggtttgtgtgtgtcccatgtcccactgcctccccagcacaggctcttggctgcccactcccaggctcccagtgtccccacctctgccccaccatggctgccccccttcatctggaggcctgaatgcaggctcaaggaggactggggactgctggattggcccctggcatcttagggtgtgacagagtggtggctctcccctccctgggctgaaacttagcataggcttctccccgacccccaatccaggtattgagcgtgtcctaaaatgactgtggcaatctggaggggctgcctgttggccatgtgtggaggcaatgtgccattagaagaggcaatggactttcttgcctctggtgggggctttgcagttacatttttcaccaaatccacaaattgtatagctagcctggccaggcaccatggcttatgcctgtaatcctaggactttgggaggccgagataagcagatcactttgagctcaggagtttaagaacagcctgggcaacatgatgaaaccccgtctctacaaaaaaatacaaaaagtatctgggcatggtggtgtgcacctggggtcccagctactggagaggctgagtctggagaattgcttgaacccaggaggcagaggttgcagtgagctgagatcacaccactgtactccagcctgggtgacagagtaaaaccctatctcaacaacaacaacaacaacaacaaaattggccaggcgtggtggctgacacctgtaatcccagcactttgggaggccaaggcaggcagatcacctgaggtcgggagttcaagaccagcctaactaacatggagaaaccccgtctctactaaaaattcaaaaattagccagatgtcatggcacatgcctctaatcccagctactcaggaggctgaggcaggagaatcgcgtgaacctgggaggcggaggttgcagtgagccgagatcatgccattgcactccagcctgagcaagagcgaaactccatctcaaataataataataataacaataattaataaataaaattatatagccagccctaagagtgaggcttctaccatacatgtttgccctgcgggatccctcctgagatactgactggtgaagtccctatcccctcctttggcccctgagggcctgcatgacccaggcctgctctgcccttcaccttggtgcacccatctttgcatcaaatattcctgccaggccagccggacctcctttgttccccagaatgggttctgtgtcccctctcctctgggccctgtacctgtggtttgccctgccttgacaacctttttctacctccttgcttatcaggacagcctgacacccctcctcaccctccccgcatccaggttctcacccagatcatagcaatgccttttaattgtccagttgggatcttggggaggatggagctttgtctctcttgtttccagctgtactgcagtgtgagacacagtacctggtgctcagtaagtatcattaagtgaagactgattgtcccatctgcttcctcacatctttgcctggtgatgagcaaatggaagctcagagagggcagtgactcaccagcatttcatgctgggatggaggcaggtttagagcttgaatctgagtccagcgcccacgctttctctcctgcaaggatgaaaggctacaggggttgagaaaaccctcccttctgccctgaaggcagagctgtggcacggctcaggcttgcttcctcatcccctgagtgtgaggctttgctgccaacacacaggggcttgtcccacctggggcaggaggaggcagagtctatggcactgcttctctgaatctgattgattcagccccacaatctcaggccctccagacaccaaaatgaacaagatccagccccagcttcaggggtgtctccacctgctgaaggtggtctctgctgaacttttctaggttctgaatcccacctcaccccaacccttctgcatcctagctcataggatgtacgaatgactcccgtgcctggactagtggctttacataggtaatggtggctcctcagagcacagagaggtgcagtggagtcccagagcccctgagccgagaatcaagcccagatctgcctggctctgaagcctgggctgcgccaagcctatcacatatcccagccctcaactgtccaagaacaagaccgcacccagttgggaggggtgaggaaaggaggctctagggaggccacagcacctgcactgggcctaagagggtgtcccaggagggatgagaaggagcagagcagccaagccagggtgcagaggcagggaagagtggggcgagagaagggtggaaggaaggttcagcccagtccgcaggccggagagtttggattttgatctgatggtagtagggagacacaaaaggtgtttgcgcagtgtgaggtcatctgtgcttggggagcctatgctggctgtgcactggggagtggaagggaggcaaggagcccagtcaagaggccattagaaggtccagaggtggctcatagttttgatagatttcatcctgctcaagtttgaggcagagtgaaagctattgggagggaaatacaccagaggacacggagggcccatgagtgctgaagaaggctgcagctgggttgggcgtcgatgacataaacctgagagagagcaggaggatgtgcagggccatgtgaagtagggtctgcatttgggggctctgtacatagtaggtactcagtaactgttcattggatgaatggatgaataactccttgtctctgggtcagctctggtcttaccctctcctgtttctcacacctcttctctttgcccaccctgtcctgtggccctggggagacctcagctggcccagtagaggcagtgctggcccatggttctgccggaggcgcctccatgtttgcgggtgcaccgcacgccttctccctctctgtccccctccccctccctgtccttatctttcccttctgtctccatggcgactcaccacctcggcttgcctgcatcccagcctctgccagggattctgagccgggctccatccctccctcctcggagccctgctacccgcagccgtgtctcctccccctggggtgagtccagcagcagcctcctctttcctgactgtcacatttcttttccagctctgaccgggagtcagctcctcggggataccatcccccgacctcaccttctacctaccgcagcctgctagcctttccgggagaaaaggcatccttacctctggttgaaggtctcggggcctccccctctgcatccggaccctctccccatcccagcctcccatgccaaggcccgccttgtcagtcacttccttttgtcatcggcttggcaaacgggcaagtcttcagtcctaagatcgggaaggagagtggggtgggaagggccctccttgggctgggggatgggccgggggtggggaggatgaggggtccctggaaatccagggtgaagatagaagtctggattatgttctaaatcttttttttttttttttttctccaaggagagaaaacagagcttcatgggaaacagcggcaacagttggtaagtagcagggccttccaggctgggatgggtgcagtgaggccaggcaggtcagttgaaatggccggtcctggaacacagagcccggcagcccagccgggagggctgtccgcctgaggctggatccgccaggctgtggagggagggacaggaagaagcaggtgggtgctgcagggaggcagatgccagctcagagcagagagcggaaggaatcttctaagatccagagccatctgcccaactgcagcacaggctgatggcttctcctcactgtccctgtagcatggggttgtggagggtatcatccctgggggcctggctgaagtcagcacctcatggagggagccccgctgtagaacgccgggagaggctcttcccaagcatttgcaccaggcactgtgcagacagctgcacacgcctcctctcggatggccaccccaacggccccatgaggggtattgctatcctctccattgggacagttaggaaattgaggcccagagaggggaaggaacttgcttgcatttgcatggctgggatgtggtggagtccattccactcagattttctccctctcagactctctcaccattgctctgctgcccccactctgaggcccccaggtcctaggacacatgtcagtgaggaacgggcagagcttggcctctctgggagcagctccgcctgtccatggaggcactgatggaaattgggttggcacaaagggacctccactcccaagccatcagtcttccaccacaaccctggccggtaccccctgcccccaatagacatcctgcttttcaatggcctgttttgccccacaggtcccatacacctttccccaagttggagctaggcctggggccccagcccatggcgccccgggagctccctacctgctccatctgcctggagaggttgcgcgaccccatctcgctggactgtggccacgacttctgcatacggtgcttcagcacacaccgtctcccgggctgtgagccgccctgctgtcctgagtgccggaagatatgcaagcagaagaggggcctccggagcctgggcgagaagatgaagctcctgccgcagcggccgctgccccctgcactgcaggtctggggactgggcctaatcagtcagacccaagaggagggggtggctttggccctattctagaacatcaggacacagagctccaggctgaacacattccagggtcaggagctggtcctggatgctcaggggcccctctcttctcctggcccaggagacgtgtcctgtgagggcggagccgctgctgctggttcgcatcaatgcctctgggggcctcatccttaggatgggggccatcaaccgctgcctgaagcaccctctggccagggacaccccagtctgcctcctcgctgtcctgggggagcagcactcagggaagtccttcctcctcaaccatttgcttcagggcttgccgggcctggtgagggcggggcggggcaggagggaggcggggagcaaggatgggggttcctgcctgggggaagctgggtctggtattccggtctgtggggacaaggaaccgaccaactgatgctctcccttctctcccctgcaggagtctggtgagggcggccggccaagaggaggagaggcatccctgcagggctgcaggtggggcgccaatggcctcgccaggggcatatggatgtggagccaccccttcttgctggggaaagaagggaagaaggtgaggggggaagtggcagaaggaggtcagggatgggaaggggaatcaagaagggcgtctctggggtgaggatagaagatggggatgggacggggcagggttgggaagaatgtgggagaacaaggcaggcctggccccttgggtctttccctaccccctgcataggtggcggtgttcctggtggacacaggggatgccatgagccctgagctgagcagggaaacaaggatcaagctctgtgctctcaccacgatgctgagctcctaccaggtgatggggggcgctgatgttggcatccccaccccacacacccttctccagctcagcttcctcaaggccagagcatctcacaggctttggtgtctggggtcctgataggttctggggctgccttagaagggggaaggtgctcctagttggtgaaggtgggaacgtgggttattcctaaaagtgggctgatggtcccaggggcagctgaagacctgatggatcacattaccctccaggcttgtctccggccttgaggccagcccagccctgcagccttcgaggcccccatactggcctctcccatactctgaggcccacaggctgcctgcgagctccctactcaccagggccttccccagtgaagtcacccggcctctgtaatctctcatacatgttgttctctctgattccagatcctcagcacctcccaggagctgaaggatacagacctggactatctggaggtaaagagacctctgatgttggggcatcccccacccccaccctccccactagggctggacccaaaggaactaggtgccctcctggtctggcctagggttttatgacacttgaacagggttgaagggggagggtggagagtaaagcaagagatgtgtggtctggggagaggcaggagaaccccaggctgcaaaagggggagcctagctcctacagcaggcgtagggaggtggggagacaggcttggggtgcaccatagtcctcaaagtggcccagccctgacgctttctgtgtcccacccccagatgtttgtccacgtggccgaggtgatgggcaagcattatgggatggtgccaatccaggtgagacacctatctctggattcattggccccaggccccgccacccccatttgctggtgtcaggaccccttctctttcagcatctggacctcttagttcgtgactcatcccaccccaacaaggcagggcaggggcatgtaggcaacatcttccaggtgagtggtgcaaggggatggggtggaggggccatggacagggcagaggtggggaagacatgggaggctggacctcctagctcagagcactcctctcgctgcctcacagagattgtctggcagataccccaaggtgcaggagctgctgcaagggaagcgagcccgttgctgcctcttgcctgccccagggaggcggcggatgaaccaaggccatgcaagccctggtggtgagtgtctctgagagctgaacctctcttgcgctgctcccagctcccctccggcaaccgagccccttgaagcacccacctctcctggcctctgacaccccttctcctcccaaagcccgcagtctctcagcatgcacatctctccctcagacacagatgatgacttccgccaccttctgggggcctacgtctcagatgtgctgagtgcggccccccagcacgctaagagccgctgccaggggtactggaacgaggggcgcgccgtggccaggggggacagacgcctactcacggggcagcagctagctcaggaaatcaaggtgtgaaaactccctggagacccaggcgactcggctgggcccctgctctccctgaccccagcgatggtatctccgcagaacctctcaggatggatggggaggacagggcccggtttcacctctccggatgaggtatgagcgctgggggatccagcattctggcagggagacaggggaggcagggaggtgggggctgtgccgaggcctccggggtgggggtctgtgtgccctgggagtggagatgaggaaacaagcagcgcccctggctgagaaggaaggaaggaggcagcctgggttttcccgtggacagatggctgctcagctgcacgacctgaggaaggtggaagctgccaagagggagttcgaggagtatgtgaggcagcaggtgagccccggggctgcacgggaggcaggtgtgggccgggcagggtccagatcagggagaggatacctgggactcctggtcagggcaccttcttttcccctccctgtcacaggacgtagccaccaagcgcatattctctgcgctgcgggtcctgccagacaccatgcggaacctcctctccacccagaaagatgccattctggcccgccatggtgtggccttactctgcaaggggagagatcagaccttggaggcactggaagctgagctgcaggccacggccaaggccttcatggactcctacacgatgcgcttctgtggccacctagctgctgtggggggtgctgtgggggccgggctcatgggcctggcagggggcgtggtgggtgctggcatggcagcagctgcactggctgcagaggctgggatggtggctgctggagctgccgtgggggccacaggggccgctgtggttgggggtggcgtgggtgctgggttggctgccacagtgggctgcatggagaaggaggaggatgagaggcttctggaaggggaccgagagccccttctccaggaagagtaacagccccaggaggtattgaaggacaggagagatgtcaggtggggatgaagaagaggggcaggtcgggggagggtgatgccagggattccaaggcaccgccatgtactgcactgccctggtcgaatgctcggtgtctgggtggcagctgagctgggactcaaggtggctcttggaacctgggaggcagcatctgggggcagtggatagaacacccggcctgtttctggttgcagatggttgccgatctgcccttgtcacagataggctacatcccagggtttctggctgcaagtgagactccaccctccccacctggctcatttccccgatgaccctggattgtaggaaagttaagcaggcaccatcctggaagtctacccctaggtggtcgagagacctgttctttcacagatgtgagaagccccaggatgattgaccatggtgttcaggagcggggagcactgatgaggtgctggggatgacaggaaggaaggaacactgggcagaaccagagagatgggacatggtagactgtggcccagaccccagagcagagaaacttgttcccatgacccttcccaaatctgctccagcaggactaaggtggctttcccactcctggcccacagccccagagagcctgtctgtgcatcctgaaccactctttgctgggcctccgcaagggcctctcttgggtctgtgtcctttttcaagcctgtttagatgggggagtgcccatgccctctgtgaagtgcccaaatgcgaaagaataacaccttttcttgcattctgagctaagccagacagcctttatactagattctatcaaaatcttgcaaaggaaaacaaaatgaacaacttctacccttaaacacatcctttctcccctgggcttgtaagaagatgcagcttgatgcagctcctcaaacaccaggccccctgggaactgggggtgcgggagttctccctctgggggacagaaaatctgactactaggaagacttctaggctatgaaactgacttctaggctatgaaacttacagggtatgggtgggcacattatcctttattttatgaaaaataaaatgtgtgtatgtgaatgtcagcttcccagtatattattgaaacagaatttaaccctcagatgacttcatggtgggagcaggtgaaccaatgagatccattgctggaatgcacagatgggaagagggagattggaattcaagagatccaaggaagtgaacgtcagaggtccccattcagtggctgcaagaggcctcaggccaaggccaagtggatatgggcacctttgcaggctcttccactaggacttggggttccgctcctcttgtctcctctctgagaaactgcttcccatgatcctgtcaacaggcagtcaacaagcacctgtcccagcaagaggacagaatggatacataagcagagagaacttggtcaagccttgaaggaaggagaagcccaggaccacttctgcagggctcagccagccaggagttcacccaactgattctcctcccagccctgctccccagctccccagctccccatctcagaaccacagcagtagtcactgcatccaatcctggcattttataggtgcacacccagagagagaaagtctcagataagcctgtgcagctgctgatgacagaagcaggggaaccccgaagtcctggttcccaagctggtgcacttcctgaagttattttgttaaggtcgactgtgctgaaattgagatgctccttttcagatgcttcttctggctgatcaggtccagctccagggaagtgtgtggtgggcagaggcagcaacgtggtctagaacagatggctcagcagtgaagctatagttaacaggctggggacaaaatacagaatgtagagaaatcccaaagccagggtggggttgagtggggtaaagacaaatgagagtgactctctcttttagggtctgagccaagggtgggaacagggtcttaactttgtgtagtgtttgtggagaaggactttctggaagcatctttctgagcccttccactgtcatctggtggacacatgagctatgaaaccttccagactttggaggctcaggatgagggggcccagagactcagagagggagggtgttacatggctagaatcccacccggcagcactggaaggaacaacagttcagtgtctacctctccccactctttgcacagatgggaagaagttggcccagtgagggatgtctctgcagagacaagatgagtaatattaagtggtgtttgtcttgtgccttgtagctttcaaaacatttcctcaaacattatctcccttaagccttgaaatcatctcaagcagtatgtagaacacacattttcacagaggaggacgctgaagctgagagaaataatgtgtctcagtggaaacaactagtcagaggtaggccaggacttgaccccaagagttctggtgccaaatccctggctcagtggagccttcaagcctctccagactccaagacgaccaggcttctgggttccaaacctgattagttggcttcctgggcttccaacattgattctgtaattcacaagagcccaggtgtgactcattgaccgaggtctcagcagcatgctgacgtctggctggtttcccttctgtgacccactgcaggttccaagattggtaggttccaagattgggttagaggtttggtgacttgccgtgtggttcctgtttctgaggcctccctcatgttgcagatggcagtactgcaagacaagaggaacctgcgacctgaaggcccttgactgcttggatcaggaataagccctcaactccactggctctcatcaaaccacgccgcgagcaaggaataaacttttactgcatgaaggggatgcgacatctaggtcgacttagtacaccatcacccaccctactctaacacacacagaaatgggttctttgaaatggagtgatgctgtatcagacaggtaaagtatcaccagttgggggctgggcagtaaggaaaagcattttatgtcacagcagaacgtttgctaaaattgttgcctacggcaacttggaagacagaccttgtgctatcgaggaaaaaaaactattttaaataaaatctcctgccaacccagaatattctctccacaaatgtagaaaataaagaaaatactagttctgtgattgaataagcattaaacacatggatgcattatcagctaacgcaatcataaagacagtcagaaatccccctatttatgtagtcaagcagctacaacccgttacacacatgctgtcatgtgtgaggacttgaactcaggtgagagagagctccacagcgtcgtttgctatacatgcacttacagcgtacctaattcacctggtgattggggtggtcatctgtgctaattagtgcctttttctgtagggaaaataaagcaacttgaatctctaggaaatgcagttgttggccgggcgcagtggctcacatctgtaatcccagcactttgggaggccgaggtgggcagatcacgaggtcaggagttcaagaccagcctggccaacatagtgaaaccctgtccctactaaaaatacaaaaaattagccaggtgtggtggtgggcacctgtaatcccagctacttgggaagctgaggcaggagaatcacttgaacccgggaggcggaggttgcagtgagccgagatcacaccactgtgctccagcacaggcgacagtgtgagactccgtctcaacaaaaaaagcaggttgtgcaaggcacctaggcacgccttgacacaccgttggtgacagcaacatgtcgtccttgatgttacacttacgagagggggctcccagccttttcagaaaaacagttttgggttttaattctggtaaaagatttatttaaactttaaaaagacttgcataagtatctgaaggaacagaggaaggatttacaaatacaggctttctcaaggaaatagaaaggggagggggagaaggggtctcttttccttttggaaacaaaacgaatgccatcttatttttatttacctttacagtttcccgccctttgttatcattattgttattattatatttttgagaaggaatctcactctgtcgcccaggctggagtgcagtggctcgatctcagttcactgcaagctccgcctcccgggttcacaccattctcctgcctcagcctcccgagtagctgggactacaggcgcccacgaccatgccgggctactttttctgtatttttagtagagacggggtttcactgtgttagccaggatggtctcgatctcctgacctcgtggtcatcccgtctcagcctcccaaagtgctgggtattattattttataacactataatttatttatttacttatttatttatttatttattttgagatggagtctcactgtctcccaggctggagtgcagtggcacaatctcagctcactgcaagctctgcctcctgggttcacaccattctcctgcctcagcctcctgagtagctgggactacaggtgcccaccagcactcctggccaattttttgtacttttagtagagacggggtttcaccatgttagccaggatggtctcgatctcctgacctcgtgatccacccgccttggcctcccaaagtgctgggattacaggcgtgagccaccgcgcccggccagtaacgctataatttactaatgatctccattgctttttttttttttacctttctttgggcagtttgcagccattaaaatattcagcgagcccacagtaaaacagcaaagctgatcaggctgttagaacaaaacatcatagactgactggcttataaacaacaaaaatttattatagttctggaggctggaactccaagaacaaggctcctgcagatctgatgtctggtgagggcctgtttcctcatagacttccatcttctcactttcacttcacatgctggaaggagtgaagggtgtctctgggttctcttctacaagggcactaatcccattcacgagttctctgtctttatgacctaatcactcccaaagaccccacctcctgataccatcaccttggggttagttaggatttcaacatatgaattttgggtgtacataaacattcagcctgttgtaaaagcaatgatcaggatctcagtgggatgaatttaacagtcagtagaatatgtacctcggggaaaaacctctaaacacatcatactaatggtgaatggttaaagcaaacttgattagcaatgtgcaaaaattctccttcggcacacattaatgttacaaactgccgtgctgtctttatcacttgccctttcatgtagttaactatttgagtatcattttgtagttgcttacaaagtcttacccaatctaagactaaggagtggcttacctgcagcacctatctaaaagtttaagacttttctttttcttttttttttctttgagatggaattttgctcttgttgcctaggctggagtacaatggcataatctcggctcaccacaacctttgcctcctgggttcaagcaattctcctgcctcagcctcctgagtagctggaactagaggcatgcaccaccacgcccggctaattttgtacttttagtagagacggggtttcgccatgttggtcaggctggtctcaatctcccgacctcaggtgatctgcccgcctcggcctcccgaagtgctgggattacaggtgtgagccaccatgcccggccatgtccgtggctcttattatgttaagtcttgaggacaaacccacccatcggccattttccacatcagtccaatcaatagttttattatgatagcagtatgtcatgctgaacgagtgatgaaatctcagagcttttttctagctaattgctaagctgctttattgccaagtccctctgagatccttgtggtgaatttttgtttgggcattacattacttctcaacagtccaattctgaatttttggccgtttccattgcaattgtattatgtgtttttgtaattgtctcaaagcattaagtttattattgaaagtatcagtatcaacaagcattagctacgcttgtctatttctattcctccaaggactgtatttaatgtttccttttgtccttgtatggcctcagataagccccttaataatcagatttcataatgcgagcgcctaggggatgcaattctggttatgcaaactacttagcctcagacactttgtgtcaaacttagggcttgagtattttgatgcatattagttatgttagtgttcccaaaaatgcactttgggaggcctaggcaggtggatcacctgaggtcaggagttcgagaccagcctggccaacgtggtgaaaccctgtctctactaaaaatacataaattagccaggcgttcactcctgtaatcccagcactttgggagacagaggcgggtggatcatgaggtcaagagatcgagaccatcctggccaacatggtcaaaccctgtctctactaaaaatacaaaaattagccaggtgcaatggcaggcacctgtaatcccagctactcgggaggctgaagcaggagaattgcttgaacctgggaggtgtgggttgcagtgagccgagatcaggccactgcactctagcctgggtgacagagcaagactccatctcaaaaaaaaaaaaaaaattagccaggcatggtggagggtgcctgaaatcccagttacttgggaggctgaggcagaagaatcgcttgaacccgcaaggtggaggttgcagtgagccgagatcgtgccattgcactgcagcctgggtgacaagagcaaaaccccgtctcaaaaaaaaaaaaaaaaaaaatggtcccaccttcactctgacgacaatcagattgttagtcttataaatttgggccatatctatcctgaaaacacaatatagagcagatgggaagtaaataattgtggggaccattactgggagtacagaaagaaaagtagtgttacaaataacatgtttgtttctagtaaattatgagtcttaaagtaattgaaatcatcactgctgtgaataggccagcagggctgtttatgataatagtaataataagttcacaaaaatagttcttttcagttgaattcagtaccaatatcatttattctagaagatttaagtttcaagtccttgtgggaatccaagtccagttgaaagcatgaatccagctggatttttatttcactttgataatcatatcagaacatgtgaaagggtccctcgcagggtggtgacagccatctttcctctagaacacccttatgtacatgaaattacctgatcgtttatggggtccagatttcctttggcagatccttctgaatccttctggttttacgtctccagggaagagagaagcccttttaagtacagaacacaattatgagaggattcagttaaattgggcccaggacatggtctcagacccaattcctaggactgccaaacataatttcaaagggagcaatatgtgcttgcttgcagggttgctctcatttttaacaaggctagcactaaagcatgaggccattttaggccagcagatttctaaatgaggttttagagtcgaattcatctgctctatttgtccagaggactgagggtaacagggagtatgacagcatgatttgcatcattcctgaaccacaatagactatgggctatgtggacatcctagaaaacataacgtgacaaaaatcttttgccttccacaggccttagttctacagaatccagctgctgtgaggtccctggtgaagctggtggaagagaaccttctgtatgtacctggggagtgggcttaaaagaatcctgtcaacaacccgcacatcaacatgttttggatgatgctacctgctcagcaggcatagtgaagtggagtgcctttaagatcacttttcactgggggatggttttgttgatgacacaacattactaatcaagcaaatgggaaccaaggtacaatattattttgttagctaattcccatagtccagtcagatttttttagcccctttcttattccatttgtcaatttccttttgtgatgcatagttttgaaagtaaataaaaattacttatgttaaaagtgggacttctggccgggcgtggagggccacacctgtaattccagcactttgggaggtgggggcaggcagatcacttgagtccaggagttcgagaccagcctgagcaacatggctaaaccccatctctaccaaaactacaaaaattagccgggcttggtggcgcatgcctgtggtcccagctacttgggaggctgaggcaggagaatctcttggacccgggaggcggaggttgcagtgagccgagatcacaccactgcacttcagcctgggtgacacagcaagaccctgtctgaaaaaaagaaagaaaaaaaaagtgggacttctaagtttgggtctgccatatttgaagagtggcctttgcagctcttcagtaaaattatttcctttagaaatggcattgttttgcccatgtgaatgctacagtgtaatgcctctaaacactcaggtcttaattttcttttcttttgcttttctttcttttttttttttttctttaagacagggtctctttgctctgttgcacaggcaggagtgcattggcatgaacacgactcactgtagacttgaaatgggctcaagcgatcctcctaccttggtctccaaagtgctagggttacaggtgtgagccagcatgcctggcctcagctcttaattttctgagatagtttacttcctgtcaaagtcaagaatctcctatttttcagaatcttccctgttgcatgactgacactaaacagacatttactatcagtacgtccattcgtttgaagtcctgagccaagccctagtaaatgtaagctattcattaacttgaattgtgctgaattgattccaggcaaaataagctcccacaatttcatgagcagctaccacagcataggaagcctaagttggctatttgcatcctgtatgtgacccatcggcaaatgtgatctgtcaaaagacaaaaagcacaagtttaaaaatcttaatcggcttttatttgtgactcaagaattgggcaataactcattcttgtaaaacagaatgagtgttccgatgagctgaacgaggaggtttggcttgataggcagaaaagggctgtggaaagcagaaacagagaacaaaaagcagatgagtggtttcaaagtgactttccttgtatgatggtccccaacttaaaatgacttaatttgtaatatttttaatttaggatgggtttattgggagcatctgcaaagtttaaagcagaggggatgtcctatcatgctggctaaaactggcctgtttggggatttggctattatccctgtgtgtcctgattccctggaaggtcagataaacaatttagttttggcttgttggtgtggaacttcagcatgaagaaccctattttggtttggtctgttcggcctagtgcagaagctcactccagactaattgcatcctataaattttatttaacaggtcaaagctgaatttttaacagaaaagtcagataaatcacattggagcccagtgtcttcttttattaccatttgtgttaggctgttcttactctgctataaagaaatactggagaatgggtaatttataaagaaaagaggtttaattggctcatggttctgcaggctttacaggaagcatggtactggcatctgcctggtttctggtgaagcctcgggaagctttcaatcatggtagaaggcgaaggggaaacaggcacatcacatggcataagcaggagcaagtgaggcaggtggtggcgcgggtgagcagtggaggggggttgggggaggtaccacacacttttaagtgaccagatctcgcaagaactcactatcaggaagacagcaccatgccatgagggatccagccccaagatccaaacaccttccaccaggccccacctccagcatcggggattacaattcaatctgagatttgggcaaggacaaatatccagactaaatcaacattgtacaaccatgatcatctatttgatcaaagtctgttgagatagcagagtttaggagattgcatctcccaagcacaatataggcatcggataataatgcttgttcacagctggtcccatggcacacctacaagtgtcgggtcttatgcactggtaagatagctatcacagtatgggggacataaaaataagtcaaatgactctaggggccaagggaaaacttctccttcaccctctgaatgtttgctgaaaaaccaactcacaaaaggcagattaatatgaggaataacatagaaatttactaatgtgcaccaaaggaaaatcgcagtgattatcccaacccctcaatgggattcagaagcttacttaccctcttgaggttacagaaagaatcagggctcagagcatgacccaaaccagattacagtggtagatcagattatggcagttatggaggggaagaagaggaggcctggctagcaaagggggtcttgttatgtagatgaagcctcacaggtagcggcccttgagagagaataggtggtgaatgtttcttttagactttaaaggtgtcagactctcagttaatctttcccaggtctggatgagggaaggcctcagagacggcccggcttcgtcagtgcagatttctctacagatgcaaatctcccccacaaaaggcagctttttagttatttttgtatttccagcccttctgaatagccatcttaaactatatcaaggaagtataggctgggcgcggtggctcacgcctgtaatcccagcactttgggaggctgaggcgagtggatcacgaggtcaggagatcgagaccatcctgggtaacacagtgaaaccctgcctccactaaaaatactaaataaataaacaaacaaataaataaataaataaataaataaataagccgggcgtggtggtgggtgcttgtagtcccagctacttgggaggctgaggcaggagaatggcgtgaacccgggaggcggagtttgcagtgggccaagattgcaccacagcactccagcctgggcaacagagcgagactccatctcaaaaaaaaaaaaaaacgaagtatattttggggtgaaatatttttattttcttcagtccccagtttgagacttttaccttcagaaaatttcacatatggaaaggcaagttgaagccaggtacaatggcttacgcctgtaatcacacactttgggaggctgaggcaggcggatttcctgagctcaggagtttgagaccagcctggccaatatggcgaaaccctgtctctacaaaaaatacaaaaattagccaagcgtggtggtgcatgcgcctgtagtccagctacttgggaggctgaggtgggaggattgcttgagcccaggaagtggaggtttcagtgagccaagatcgtgtctctgcactccaacctgggtgacagagcaagacagtgtctcaaagaaaaaaaaaaggcaagttgatagctttgaaaagatttgagttagaggttgttagataagaaataggcaaaggaggggaaaaacaaattgagataagcagaaaagagcaaattatatacattttcccatattcttttaaatcactcttcataccgagaataagtcagtttggttaaacagctttgtctagttttaggaggtgacattgcagatgggataggtctggagtgcagtggcacaatcttggctcactgcaacctccacctcccgagttcaagcaattcttcggcctcagcctcctgagtagctgggattataagtgtgcaccaccatgcctggctaattttggtatttttagtagagaccaggttttcaccatgttgtcagggctggtgtcaaactcctgacctcaggtgatccacctgcctcagcctcctaaagtgcaggggttacaggcttgagccactgcgcccggcctgtggtggcatgctgacagattttttgtggactgtagttcaaatcaggtgttcaagtaacctttctgagtagcccatacaccagcaggcatgaaggctatttacattaagttgctctggtgatttatcccaaagtttatatcaagttgtctagcttcagtatgcagggcttcaagaaaaacagttttaatttccagtgagtccaagtcagaaaaatgggagaaaaatggaaaaacactaatctggagacttgtagctggaaagatttcaggattcagcccaataataataatagcaggtgtactgtggttttcttctgaaacataatttttctgtctctagtcccccttttctaccaaagacaaatcatagtaggaccattttatttgtaaaatacaaaacagtacaaaaaattagccaggcgtggtgatgcacacctgtagtcctagctactcaggaggctaaggcacgagaatcgcttgaacccgggtggcagaggttgcaatgagctgagattgcaccattgcactccagcctgagcgacagagcaagactccatctcaatttaaaaaataaaataaaatgaataaataaatatgtgaaaagcaagcacagctggaaggcagagcatctagatccccaaaaataaaggatctctttttttttttttgtgacggaatctcactcactcttatcacctaggctggcgtgcagtggcttgatctcggctcactgcaacctatgcctcccaagttcaagtgattctcctgcctcagcctcctgagtagctgggattacaggtgcctgccaccatgcctggctaattttggtattgtttgttgagatggggtttcaccatgttggccaggcaggtctcaaactcctgacctcaagtgatccgcctgcctcggcctcccaaaatgttgagattacaggcatgagccaccacgcccagccaaggatcttatttttacattgaatcccaggtccccctaaagagggacactccataggaccaagtcttttttttttttttttttttgacacggagtttcgctcttgttgcccaggctggagtgcaatggtgcgatcaccttaacatacgcctcccgggttcaactgattttcttgcctcagcctcccgagtagctgggattacaggcatgcaccaccatgcccagctaattttgtatttttagtagagacggggtttcttcatgttggtcaggctggtctcaaactcccgacctcaggtgatccgcccccctcggcctcccaaagtgctgggattacaggcgcgagccactgcacccggccaggaccaagtcttgtacgatgcttccacagtgcaccttactgcaagagaaacccaatgccaatcagcccattctgtgctgagctcattctcttgagagtcctatgccttggtggtgagtgtttccacagcctccaagtgtccacactgcacctttcttatctaaacacccaaagaaatgagtagccccttgcaaacagctgcagtcagccatctccaaaactgcagccctcaccagtgaccagccagctttctcacacacacaaaggttgtgttctctcatagcacagagtaatccctgctacccccacaaagccgaagagatcatgcagtgcaatgcaagagggagcagagctttagatggaggggaacctgcctgcaactctttggaggaagaatttctcaaggaaaacagaagactttagaaagggggtgagtggagcctttttctgttttcctcaagggtctcagagtcattagaagtcccttctagatggctttatgtggcactgaagatgacaaaacaaggagaagcagggaggattagaagtaaatgggagaggctgggcacagtggctcatgcctgtaatcctagcactttgggaggctgaggtgggccgatcacctgaggtcaggagttcgaaaccagcctggccaacatggtgaaccccgtctctactaaaaatacaaaaattagccaggcgtggtggtgcatgtctgtaatcccagttacttgggaggctgaggcaagagaatagcttgaaccagggaggtagaggttgtaccactgcactccaacctggacaagagagcgagatgccatcaaaaaaaaaaaaaaaaaaaaaaaaaagaagtaaatgggagaacaattctcaaggaaggaagcaaacagagagaccaagcacataactcaaaaaggggtttcaaaaaagaagaaaaaaaagaaaaaaaagaaacacacatacagaacataacacacacacaaacacacacacacacacacacacacacagggtttcagttgactagaaaaaaaaatccccaaaacaggatccaaaaagcagaaaggcctttagaaaaaaaatgtatgtagcttgaatatcagcttttaattaagcccacttctgaccacagagctctaggaaaatatttgcaaatctcttattatcagactttattcagaacaagtagctaatactcctggcttttgaactcttttactaaaggtaccctcttcaataaaaattggtcgctcccagaagtcaaaagtcacacaaatgtcaaaccaaatgagactgatgccctgactgggaattgaacactgaatccaggctatggtggtaaaagtgtggaattttaactcctaaactggaagatagaatgcggtcattgtaaatcctacaggggatccaaagcaggcagtttgagcatacaaaggattttaacttcgttttaggtcaattttttttttagatggtatctcactctgtcacccaggctggaatgcagtggcaccatcttggctcactgcaacccctgcctcttgggtccaagtgattctcgtcccgcagtctcccgagtagctggaactacaggtgcacgccaccacgcccagctaatttttgtatttttagtagagacagggtttcgcagtgttggccaggctggtctcgaactcctggcctcaagtgatccacctgccttggcctcccaaatgctgggattacaggcatgagccaccatgcctgggtaggtcaaatttttgattgttaattttctcaagagagtttctaaatctagtcatgacaccactatgctgtctttcttttaatttaattttctcataaatacaaataaggcaattgtttagaataagggatctctaaaatccttttttaaaaaaaattagaaatgtttctaatttaaaagatccgtctgaggaggagagcaaacaatatgaatacttttaccaaaaagtacacaagagtcgctacacccaagactagacacgaatccttttctcccattaatcaagattttgcagaggaaaatagagacactgacttttaccttctgcttgactggattctgcaaaaagagaggcagggagcctgggtggtaagaatgtcttatccttccacaggctggtcaggtcctgggttccctaaactgtggcttcagaagagcagagctttggttttgtcagaaaaaggaaaatcttaaaagtggcccaagatggctgcaagttggacatatgggtaatagaaactgggcctatggactaaagctgaactctcgcctgcaaggcttgagtttgtcaaatacttcactgaattattgattacaaccttgcctatcccacgaagcacaaagacagtatagaatcagtcatcccctaagatgcctacatgctcgttaaccttttacccttgtcaacctgaaataattgaaaggatcagcatccagttttaaggagtttattcaagtgaaaaactggcaattgccatccagtaaacacagactccagtgctccgaaattaaaagttaaggtctcggccaggtgcggtggctcacatctgtaatcccagcactttgggaggccgaggcaggcagatcacaaggtcgggagatcgagaccatcctggtcaacatggtgaaaccccatctctactaaaatacaaaaaattagccaggcgtgctggcgtacacgcctgtagtcccagctactcaggaggctgaggcaggggaattgcttggacccagggtgcggaggttgcagtgagccgagatagcaccactgcactgcagcctgggcaacagagcgagactccatctcaaaaaaaaaaagacaagttaaggtctcacttatattgacagaaaacaaaaaaaaatctagtaggattataacattttctacacagggctggtttattagttacagtttaattagctgcagcatgttttcacctcctttccattgttagatgttaaacacacaaaaagtgtgtttaacattccattttagacaatgtgatcctcatgaaatctttgtgtgagagaggaaagagggaagttaatctatgatgaagatcaatagttgagagggaaggggtcttccctggcatccttcattcatttacaacattttacaaaataatttaggtaagaaaaaagactaatgtataatcagggaaacaaaagttacagcttcctaggttacagctgccagtttatgtgactcaggtcccataatcacattcccttaaggctcaaaatattttaaggttccaaaagcttagattttgaattacttattttcacaccctatatatgttaaccacgtatttgctttatcttatgtacaacgtcactgagcaccaatcagaattgtaggaatgtcacctttgcttctccatttccatgtaacagaatgtataaatactatctcgtgtagcccacttggggagacatttttggtttgttctgagtctgtatttcccagagaattagtcctcaaacttcactcgggataaaactaactttaaatttctttaagttatagtgcctgttatgtaacctttctgtcaatagtatcctgctcacagcaccaaaacttagggggcaagggaaaattctgctgaaaaatcaactcacaataggtaaattaataggagaaatgacatagaaatgtactaatatccacagaaggaaaatcgcagtgattacccccactccccagtggggttctgaagcttatgtactatcttgaggttacattaacaatgggggctcacagcagggccaaaaccagattacagtgttagatcagtttatggcggcaacagaggttatggaggggaagaagaggagggctggctagcaaagggggtcttgttatgtagatgaagcctcacaggtagcggccctcgagagagaataggtggtgaatgtttctgttagactttaaaggtgtcagactctcgcttaatctttcccagatctggatgagggaaggcctcagagacagcctggcttcatcagtgcagatttctctacagatgcaaatctcccccacaaaaggcagctttttagttatttttgtatttccaacccttctgaatatctgccttgagctatgtcgagaaaatatattttatggtaaaatcatttgatttccttcagatgctttgatattgtgattttgatttttgttcctggttcctggcataccagctcctaaactcttgggatgtctggagtgataagtgtctttttgtatgctagtgagatgattagtggctgggggttcccagatagccttaggatggggctggttgacacggaaaccaaccatacaattagaggtttggcactttcagccccaccttctaacactggagagtagagagggcctgaagcttgagttgattaccaatggccaatgattgatcaatcatgcctacataatgagcctccagaacattccaaaaagatggggttcagagagcttctgaattgctgaatagatggagctgtctgtagggtggcatgcttacaggatgccatgggggtgtgctgcaggacaggacatggaagcttattgccccttaccttccataccttgccctatggatcacttctgcctggctattcatctacatcctctgtaatattccttactaatataataagctggtaaacataagtaaatgtttccttgagttctgtgaacttcctaacaaattagaacggggttgtgggaaccccaatttatagctgctcagttagatgcataggtgacaacctgctacttgcaattggtgtctgaaaataggccagtcttgtgaaaatagaactaagccttaacctgtgggatctgacactatgcccaggtagagtgtcagaattgaattgaatgggaggactcccacttggtatccactgtagaactgcttagtgtgtgaggacaagcccacagacatctggtgtcagaagtgaagtgttgtgttgagtggtgtgagtaggaaaagcagtttgtttttttcatctctcttattaagacccaaagtaagggcttgagcccctataataagtgtagcagctcctgccatagctcgaaggcatccaggtacccagaagaactgagaagtatgctactggtctatcgtctaataccaacttttgaattaaattctactgtggcaggccaggtctcactaacagctgaacaggcaggcctccatgccaactgcttcggcactgagtggttaggttaaatattaaaagctgaaagacccagggcccctatacaaaggctggaatataacagaagcccaccaagagtcttgcttaggccttttctgggccttgaagcatgacaggataatgaaggaattcttaacaggacctgtttagaattaaacaagttttattttttattttttaaatggagtctcactgtgttgcccaggctggagtgcagtggcacaatctcagctcactgcacctccgcctcctgggttcaagcgattctcttgcctcagcttcctgagtagctgggactgtaggcatgtgccaccacgcccagctaatttttgtatttttggtagagacggggtttcactatattggccaggctggtcacaaactcctgacctcagatgatccacccacctccgcctcccaaagtaccgggcatacaataggtgtaagctgccatgcccggccaagattaaacaagttgggttttttgttttgtttttgttatttttgagacagaattttgctcttgttacccaggctggagtgcaatggcacgatctcggctcactgcaacctccacttcccgagttcaagagattctcctgcctcagcctcccaagtagctgggattacaggcgccggccaccatgcccagctaattttttgtatttttagtagagatggggtttcaccatgttggccaggctagtcttgaactcccgacctcaggtgatccacctgcctcagcctcctaaagtgctgggattataggcgtgagccaccgtgcccggccagattaaacaagttttgttgggggtctgaaggatctcccaaacctccatgatttaacaggagacaagataagggtaatcacgcctgacacctggacccatttagattaagtaaatttactgaggctctagaataaggtcttcatgattcagaccttagttatagactagaaattaatcacttatgtatttagatgaatgcacacttacacgcagacatatataacttagaaggtatataagctctagaaaactttgcaattttgggttggtttggtgatattttcctaaccttttccctgtacccggttacagaaataaactctcttctttcccagttcatctgcatcttattattgggccatgaaagtaagcagccagacccttggtttggtccaggaacactaccagcagtgcctttcatggcaaatcacttggaaaggttttttcaaagtttggaattcttgaagcatggagagagactatagccaatttcagttgttcaaaaggctcttcaggctaggcacggtggctcatgcctgtaatcccagcactttgggaggccgaggtgggcggatcatttgagaccaggagtttgagaccactctggtcaacatggtgaaaccccgtctctacaaaatataaaaatgagccaactgtggtggcctgtgcccatagtcccagctatttagatggctgagacatgagaaccacttgaacccaggaggaggaggttgcagtgagccgagatcatgccattgcactccagcctgggccacagagcaagattctgtctcaaaaacaaaacaaaacaaaaaagccttttcaggttctaaggattaagtcagagattctggaatattgtcatgtaatgctccatcagaggtttttgcctgccctgtaaaagctggtgttaagtaaagtaaaattatgggagatcattgttttggatgaagctcctgcactagaccccagaggaccagactaaaaatcaaaatagagtcacctatgctaaagttccaggttacaaaaccaaaactaagttgttatctgacaggagagagatttcccaaacaggccagtttccatttttaagcagcatgataatgaattctctctgctttaatcctcacacaaaagcagcagcctgaagcaacctgagaataacctagtcagttattctctattgttctgtcttcctgtgcccaccttaccagaaaagtagctttgaaaccagggatatgctctttgttctttgcttctgctttcttcatcccttctgtctgtaaagccaaccccttctgctcagctcgtgggaacacttattctgttttctggaatggagtgttgcccaattctaggctcataataaagtaaattgagatctttaaatttgttgtagttttgtcgtttgaccttggagtccactgtggaaaatatcctacccatctctaaaattgtctttaagttatttttcctgttgtagaccatttcatgtgaaaaattagctaactcctagattataacacttttgtgttcttcagtgacaaatgtcctaaatattttacctcagtttggcaatattacaatttgtctagtaaggccttaagcctctctgaagtgaggaattctaacaaagccaaaagtatcagtttggcattgctctttagtttcttaggctatcagcaaatcatctacatattggattgtaaaccaaaaataaaattctaagccccttaaccaactgaatggacccctcttcttggccaaggggattccaaaataaactgaaacactacttctggccatgatgggaatgggtggtttgatatgcctcattataccttcctcccttggaactcaggcacaactgaccaccattaatattaaaacaagagaccttaacactgatgaaatagactcattttttctttttttgagacagagtctcactctgtccccgaggctggagtgcagtggcacaatcttggctcactgcaacctccatctgcctcccaggttcaagtgattctcccacctcagcctcctgagtagctgggattacaggtgcatgccaccatgcttgactaatttttggatttaaatagaccctttgcagcaataagataccaacatgacagatagcaggccccaaaagaaatagaaatattttaccccaaaatatatttctttgacatattttgaaatggccctgcacagctttatcttgtggagaaaatctacattcagtagagaatccccttccctttccaggtatttttcctgatgcaggagagaattaactaagagtctggcacctttctaagtctgataaaaaaacatgtacaatctattctctctgaagtctgctacctgaaggcatcatctgcataataagaaccttgatttcccaaaccccttatcttaacccagatattctcttctatggattccaggtctttagataataactctttcaaccagttgccaattagaaaatctctgaattcacctatgacctggaagccccctctttgagttgtctcacctttcggcaccaaaccaatgtatatcttacatgtattattattattttgagacagagtcttgctctgtcacccaggctggagtgcagtggcgtgatctcggcttaccataacctctgcttcctgggttcaagcaattctcctgcctcagcctccttaatagctgggattacaggtgcacgccaccacacctggataatttttgtatttttagtagagatgaggtttcaccatgttgttcaagctggtcttgaactcctgaccttttgatccacccgcctcggcctcccaaaatgctgggattacaggtgtgagccaccatgcccagccatcttacatgtattgattgttgtcttgtctccctagaatgtatgaaaccaagttatggcccaatcaccttgggtgcatgttcttaggatctcctagggctatgtcacatgtcattggtcctcatgtttggctcagaataaatctcttcaaatattttacagagtttgactcttttcgttgacaggataattataaatttctctggtgggacaaatttccctaatatttcctgtaaattgctagagaaaagagtaggagagtcctgaaatccttgagaaattctttactaagttaagtattgaactcctttgtaggtaaaagcaaacaagggtttggacaggaacaggaagaaaaagcagaacacattacagacaacagaaacaaagtcaaaatagttgcaggattaggaactacaaattcatttacttctcaaagatcttgtacaaatctacacaatggtcaaccatctttaccaaatttactttccttgcttactggaagtatgggagtatgacaaggtgaggctaccttttatagaagtatcccttgtttttctaattcttttataatgggtttgattctctcaaaccgagctcaggacaaaggatattgtttcacatacggccattgtggcatatcctttaggtaaaccatttttattggttttatatcttgaattaaaccagcagtattattcctcagggcccaaagggacgcatggatctgagttagttggggggcgcttttcagcatggtgtgagattgccactctctctcatcacttttttcttccagaaggcagagtaaacaagtcagggtcctttgattctcttttccagggagcttgacaaacacttcatctaagtacagaatatggttgcctttaagttttgcagcaggtatctcccaagtggattttttaggagaattaggagaaaagaagaatacattgttcctcattcggaggatctatctgtatgggaaccacagaaaagaaggaacggttaaaaagaattctaattgctgttgggtggagtcttaaaaatattaattaggtcaatgtgattaatagcactgccaagtcttaagtatctcccctgggttttatatctacttggtcatcaattactgagagaggaatattgaaatctgttactgtaattgtggatttgtctgtttctccttgtagttctatcaggtttgcttcatgtattttgaaattatgttatttagttgtatagacatttaagaatgtcttatcttccttttgcatgtagcattatgaaatttttctctttaacatacgtcatagtcattttgaagtttactttgtctgatattaatatggctattccatgtttgttttatttagtgactttgtggtatatcttttttcattttgttactcttaactacctgtgtctttaaatttaaacttggtttcttgtttcttatagacagcatattttacatcttgcttttcttattaattctgatgatatctgcttttgttcacagtctttagaccatttatatttaaaggaattctgatatgatgtgcagtgatgtggttttttcttttttacttttttatcattataaaatacaaaaaacgtaatgtgtgtatttctttatgtttcctatgtttaaggtttattgagattcttggatctgttggtttataattttcagcaattttggaaattttcataagattattcttcatatttttctttacactttctcattctaaaattccaatgtcatgtacatcagattacttgatattatcacaaaaatccttgattattttttccatctgtacttcattctttctctgatcttttcttctctggtcttttttctttaatacttatatggtttggatttgtgtccctgcccaaatgtcatgtcaaattgtaatccccaatgttggaagaggggcctggtggcaggtgattggatcatgggggtggacctccctcttgctgttcttgtgatagtgagttttcatgagatatggttgtttcaaagtgtgtagcaccttccccttcacactttcctcctgccccgggcatgcacctgcttcccctttgctttctgccatgattgtaagtattctgaggcttccccagccatgcttcctgcacagcctgtgaaactgtgagtcaattaaacatcctttctttatgaattacccagtttcaggtagttctttatagcaatgtgagaatggacaaatacagaaaattgatactgggagtgaagtattgctataaagatacctgaggtctccctctccctctacctctccctctccccacggtctccctctccctctctttccacggtctcccactgatgccgagccgaagctggactgtactgctgccatccctgctcactgcagcctccctgcctgattctcctgcctcagcctgccgagtgcctgcgattgcaggcgcgcaccaccacgcctgactggttttcgtatttttttggtggagacggggtttcgctgtggtggccgggctggtctccagctcctaactgcgagtgatccgccagcctcggcctcccgaggtgccgggattgcagacagagtctggttcactcagtgctcaatggtgcccaggctggagtgcagtggcgtgatctcggcttgctacaacctccacctcccagccgcctgccttggcctcccaaagtgccaagattgcagcctctgtccggcctccaccccgtctgggaagtgaggagcgtctctgcctggccgcccatcgtctgggacgtgaggagcccctctgcctggctacccagtctggaaagtgaggagcgtctcttcccggccgccatcccatctaggaagtgaggagcgcctcttcccagccgccatcccatctaggaagtgaggagcgtctctgcctggccgcccatcgtctgagatgtggggagggcctctgacccgccgccccgtctgggatgtgaggagcgcctctacccggccgcgaccccgtctgggaggtgaggagcatctctgcccagccaccccgtctgagaagtgaggagaccctccgcctggcaaccgccccatatgagaagtgaggagcccctccgcctggcagccaccccgtctgggaagtgaggagcgtctctgcccggcagccaccccatccgggagggaggtgggggtcagcccccgccaggccagccgccccgtccgggagggaggtggggggggtcagccccccgcccggccagccgccccgtccgggagggaggtgggggtgtcagccccccgcccggccagccgcccggtctgggaggtgaggggcgcctctgcccggccgcccctactgggaagtgaggagcccctctgcccggccaccaccccgtctgggaggtgtgcccaacagctcattgagaacgggccatgatgacaatggcggttttgtggaatagaaaggggggaaaggcggggaaaggattgagaaatcggatggttgccatgtctgtgtagaaagaggtagacacaggagacttttcattttgttctgtactaagaaaaattcttctgccttgtgatcctgttgatcggtgaccctacccgcaaccctgtgctctctgaaacatgtgctgtgtccactcagggttaaatggattaagggtgatgcaagatgtgctttgttaaacagatgcttgaaggcagcatgctcgttaagagtcatcaccactccctaatctcaagtacccagggacacaaacactgcggaaggccgcagggtcctctgcataggaaaaccagagacctttgttcacttgtttatctgctgaccctccttccactattgtcctatgaccctgccaaatccccctctgtgagaaacacccaagaatgatcaattaaaaaaaaaaaaaaaaaagatacctgaaaatgtggaagtgactttggaaatgggtaacgggtagaagttggaacagtttggagatctcagaagaagacaggaagataaaggaaagtttggaacttcctagagacttgttaaattgttgtgaccaaaatgccgatagtgatatggttaatgaagtccaggctgagatggtctcagatggagatgaggaacttattgggaactgaagcaaatgtcacttttgttatgtgttagcaaagaggttggaggcattgtgcccctcccctagagatctgtggaactttgaacttgagagtgttgatatagggtatctggcagaagaaatttctaagctgcaaaacattcaagacttggcctggctacttctagcagcctatgcttatatttgtgagcaaataaatgagctgaaactggaacttatctttaagagggaagcagagtgtaaaagattggaaagttttcagcccagccatgtggtagaaaagaaaaacccattttcagggaggaattcaacccagctacagaaatttgcataagaggaaccataataatagccaagacaatggggtaaatgcccagaagggatttcggagactttcatgacagtctcacccatcacaggcatggaggcctagaagggaagaatttcctgggccaggcccggggctcaactgccctacacaacttagggacactgttccctgcatcccagctatgccagctccagccatggctaaaagggacccagatacatctcaggccactgctccagaggatgcaagccataagccttagcagcttccatgtggtgttaagctggcgggtacacagagaggaagagtggaggcttgggagcctctgcctagatttcagagaagatatatggaaatgcctggatgtccaggaagaagtctgctgcagggaaggagccctgatggaggacctctactagggcaatatggaggggaaatatggggttggagctgccacacagagtccccactggggcactgcttagtggagctgtgagaagaggaccactccccagaatggtagatttaccatcagcttccactatgcacctggagtgccacaggtactcaactccagcccatgaaagcagctgagggggctgtaccctgcagagccacagaggtagagctgcccaaggccctgggagcccaccttttgcattggtgttccctgaatatgagacatggagtcaaaggagattattttggagctttaagatttaatgactgccctgttgggtttcagactttcatggggcctgtagcccttttgttttggccaatttctcccatttggaatgggagagagtatttagccaatgcctgtacccccactgtatcttggaagtaactaacttgttttgattttacaggttcataggcagaagaacttgccttatctcagataagactttggattgtggacttttgagttaatgctggaatgagttaagactttgggggactgttgggaaggcatgattgtattttgaaatatgagaaggacatgagatttgggaggggccagggacagaataatatggtttacatttttgtccttgcccaaatctcatgttgaattgtaatccccaatgttggaggaggggcctggggggaagtgattgggtcatgggggcagactcccccttgctgttcgcgtgatagtgagttctcatgagatctggttgtttcaaagtgtgtggcacctcctgcttcgtgctcttccttctgctcccaccatgtaggagtgcctgctttcccttcaccttctgccatgattgtaagtttcctgaggcctccccagacatgcttcctatacagtctgtggaactgtgagtcaattaaaccacttttcttttcttttttttttttgagatggagttttgctcttgtcgcccaggctggagtggactggagcgatctcagctcactgcaacctccgcctctgggttcaagtgattctcctgcctcagcctcccgagtagctgggattacaggcatctgccaccatgcctggctaatttttgtatttttggtagagatggagtttcaccatgttggccagactggtctcgaactcctgacctcaggtgatccactcacctcagcctcccaaagtgttaggatcacaggcgtgaaccactgcacttggcctaaacttcttttctttataaattacccagtcttaggtagttctttatagcaatgtgagaatgaactaatacaaatacctactctgctgttaattccatctaatgtttctttaaaaatattttctatttatctcctcatcttctacattcttgagcacgtgaaccatatttatgatatctattttctatatcacgtctgttaattgcatcatttatgtcacttatgaatcttattatattgatggatttttgtcctgattatgtgtgatattttcttgcttttaccatgtctattaatttaaaatttttttttaacttatggtaaaacaaatgtaacagaatttaccattttaaccatttttaagcatacagttcaatggcattaagtacattcacattattgtgccaccatcacaatcattcatctccagaatttttttcgtcttacaaaactgaaactctgtacccattaaacagtaactccccattcattcctccgcccagtcccttgcaaccaccatgccactttctgtctctcaattaattctgtcaatgttgcttcatacatttgggtgctctgctgttagatgcgtatttctccttcagttttgaaggacagtcttgccagtcatagtattcttggttgatagcttttcttctctgaacatgttgaacatatcatcccacccctttcttgcctatacaatttctgtggagaaatctacttatactataatgggagctcccttgtacatcatgagtcactgcccttgctcttttaaagacaatagtttgattataacatgtctctctgtatgggcctctttgagttcatcttactaataatcttactaatttactaatatttgttttgagattgttgaatttggatgtccacttcctttgtcagatttgggacgttttcagccattatttctttaaataagttctctttcttctctttctggaatgcctttaatgtgtatgttgatctgcttgatgatgtcccattaatctcttaggctatcctcacttttcttcattttttcttctttttgctccctgactcaaagattcaaatgacctgttgtttagtccactgttttgtttgatcaggtctgcttttgaactcttttagtgaatttttcaattcagttgctatattcttcagctcaaaaatttccgcttctttcttttttttatcattctatctctttgttgattttctcatcttgttgttgcatttttaaaaatttcatttaattatctgtgtcctcttgaaggtcactgtgtttcttttttttgttttgttttcacgcttaattcactttatttttcttgtataaaaaccctatgttgtagccacagctggagcctgagtccgctgcacggagactctggtgtgggtcttgacgaggtggtcagtgaattcctgatagggagacttggtaaatacagtctccttccagaggtcgggggttaggtagctgtaggtcttagaaatggcatcaaaggtggccttggtgaagttgcccagggtggcagtgcagccccgggctgaggtgtagcagtcatcgataccagccatcatgagcagcttcttaggcacaggtgcggagacgatgccagtgcccctgggtgcagggatgaggcgtaccagcacagagccgcagcagcctgtcaccttgcaagggacagtgtggggcttgccgatcttgttcccccagtagcctctgcgcacggggacgatggagagcttggccaggatgatggccccacggatggcggtggccacctccttggagcacttaacacccagaccgacgtggccgttgtagtccccgatagcaacaaatgccttgaacctggtgcgctggccggcacgggtctgcttctgcactggcataatcttcaaaacctcatccttgagagaggcccccaggaagaaatcaatgatctctgattccttaattgggcagggagaagagatagatctcctccagggacttgatcttcatgtccttgaccaagcggcccaacttggtgacgggcatccactccttatcctcggccttgcctccgcgagctccgcggccttggccccggccccgtccacggccgcgaccctggccccggatgccactgccgaaacctccgcggaagccaccgcggttccccatctcagggccaccagggcctccgggcccccccgctgcaccggcgtcatccgccatttggtgttttgtcggaaaagaagccactgtgtttctttaagacaattattttgaattattaatccgatagtttatagatctccatctcttcggaggcagtttctagagatttattttgttcctttgatttggttatatttccctgctttattgtgtggcttgtgatattttttttgttgagttgtacgcatttgaaaaaaaatagccttctctctcagtctttatggattgggtttgtacgggggaattctgttcaccaatcagccacacctagagattctgggggcctctgaaatctttttaggaggacgcaattcctctgagctttgcctgtaattttccagttagagaggtttgccagtttctttttcagaagatcataatctttggctccctctggtgtctgtctctagaactgcaggttccctggtgccacagcagcaagccactctcctctcctttgttttcagaggccccatccaaagtatgctggttccctgtcagctcccctagatcagatgagacattcaccagtccttggagcagctctctgaaaagctggacagccagccaaacagcccactcttctacctccctgccaagggaagacctatgagttgagcacctcccagttaccctgagtcatgccatcctctgtgtgccgcacttcaggccttctggtggcacagtaagccaccccattctcccttgctttcagcatcctccaggcatccaaactattctggttccattagtgccctgagtcaagtaagacagaaactagttttctgggcagccttctgagaagctggaacgctgggcactcttctctcccctccctctaacctaagggagaagccatgagaaaagccgagctgtgctagcttgggacagggacaattgcagataaagtgaaatggctcttcttactgatttcaatgcactgttcttggcttgatcttgccttggggtactgcaacttcctcactggtttctagagttctcataaaggtattttggtctatatattgttgttaatttggtgtcactgtgaaggaaacaagggtgggggcttcctattctgccatcttgctgatgtcaccccaattcctctattctttactccaaaagatcatatcaggtcaaaagatgtacagaactgggtgtcaaaaaggtgttcaacacaaatatatttaatgaaaggttgaacaagtgaggcagaggtttagtgttactctaacagaatactggagactgggtagtttatgaagaaaagaggtttatttagcttgcaattctggtggctggaaagttcaagattgggcctctggtgagggtctcaggctgcttcagctcaaggtggaatgtgaaaggggaatcggcatgtgcaaagagatcacacatgctgaagaggaagcaaagcagggaggaggtcccaggctggtttgtttgtttctttgttttttgagacgtggtcttattctgtcacccaggctggacactgtaaccttgaactcctgggctcaagctatcttcccacgtcagcctcttgagtaactaggcccataggtgcatgccaccatggctggctaattttttcctttttggtaaagacagggatgttgcaatgtctgtgttgcccaggctggtcttgaatacttggcctcaagcaatcctcctgtcttggcatcaagcaatcctcctgtcttggcatcctaaagtgttgggattagagatgcgaaccatcacactggcccaggctccttttaacaaccagctctcttgtgaactaatgggaggacattaattcattcatgagggatccacccccatgactgaaacccctcccaccagggcctatctcccaaaattgccgcattggggatctaaatttcaatacgaggtttgaaggggaccttttttctgatctgctgttgtaaaaccacagcagctgtggggacaagggtaactctatttcagatgctaatccaccatgtgactcctgactaacctcgagtctgggaatgcctccaagatgtctagttgatgtattattctttatgtagaaatctctgtttactgtaagttttgccttccctcctaatcaacccttgatgttgttgcacacatcataggccatgacaccctcagcattctttcagctatctacacattccttccggagcatgtagacttccctcccgatacataagccatgggtctcaggggttgcagtacacagatctgcctgtctcgtggccatagaagactacacttctgtgtgtaagttccctaataaatcaccctttactgacaaactggatttgtctgccttgttctttggtttcttatctccttctgtgtttgtgggtcactttgcatttacagggcttttaggaaagaacaacagaccagacaaagattatacctccttgaactagtgagaaaactaaagatcaggaaggctattggatatacccaatgtcaaagtccttaatagcaaagcagcaatcagagagccagaaaatctgtaagcaagagatagatctgtagtggattgagtagtgttcctccaggtactgtctaccagatcctcagaatgtgacttcgtttggaaatgaaacgtctttgcagatgtaactaagctaaggatctcaaatgatgtcatactggacttaaggtgggccataagtcccctaactggcatccttgtgaaagaaaggagaaggagatttgagacgagacacagagggagatgccttgtgaagatggaggcagagattggagagatgtgtctgcatgacaaggaacgccaaatattgctggcacccaccagaaactaggagagaggcacagaacagaccctccctcacagcctctagaaaaaatacccccaccgacaccttgatcttggactgcaggcctccagaattgtgagagaataagcttctgtttgtttgaagccacacagtttgtgggattttgttacagcagccttaggaagcttctgttgggtttaaatttcagagccataacttctattcccagtgacaccacaggccttgagaaggggatggagtctcaggcactctcacaccatgctgactggacagcaaatctgtaaagtcattctgtagggcaatctgactatatacatcaaatgtacgttttattttatcagtagcaacaatcgtaggagcctcactcagatgcaacagtaaaggaccaaggtctgcaggaatatttaagacaccatattctgaacctaagaccactgcccagccttagtggacttgtgatttctcttccccctagttttacatttggggggcctgctctgcaacgtggtcattctgaaatcgagaccaaatcttgttcagatgcgagagaaacaaaacaaaactaggttccacccttggctaacactcaccccactcaccacaaaggatggtagtgaaactacagaagaaaacagaggccaggcacggtggctcacgcctgtaaccccagcactttggggggccgaagtgggcagatcacaaggacagaggttcgagattagtctggccaatatagtgaaaccccgtctctactaaaaatacaaaaattagccgggcatggtggcaggcgtgggaggctgaggcaggagaatcgcttgaacctgggaggcagaggttgcagtgagccgagattgcgccactgcacgcgccactgcactccagcctgggcgacagagtgagaccccatctccaaaaaaaaaagaaaaaagaaaaagaaaacagatttggctgggtgaggtggctcacacctgtaatcccagcactttgggaggccaaagcgggcggatcacctaaggtcaggagtttgagaccagcctggccaacatggtgaaaccctgtctctactaataatacaaaaattagtcgggttttgttggtgcatgcctgtaatcccagctactcaggaggctgaggcaggaggattgctggaacccgggaggtagaggttgcagtgagccaagatcacaccattgcactctagcctgggtgacagagcaaaactccgtctccaaaaaaaaaaaaaaaagaaaaaaagaaaacagatccaactgagaggggaataacaggcaaattggcatcagaaaaatcaatcccgtgcttgtgtgcggttataaatacctctgaaaattgaggacttgcccgttgttagtggattgtttcatcactgtattaaacgtaaaggggacaagatagaagatgtggtcttctaggcactggctccatggaacactatctgggggaactttctttaacacagataatgcaaatgcctatttttctaataacaattaatttaaaaaatttctatcttcaatagtgagaaaaacaaacaaataaaaacagaacaataacaacaacaacaaaacaatgaatgaacagaccgggtgcagtagctcatgcctgtaatcccagcactttgggaggctgagatggaaggattgcttgagctcaggagtatcacgcccagcctgggcaagataatgagaccctgtttctactactactactactactactaataataataataataaatagccaggaatggtgatgtacacctatagttccagctactcaggaggctgaggcaggaggatcacttatgccctggagaccaaggctgccatgagccattaacacaccactgcactctagcctgggtgacagagaatctgtctcaaaaaaataagtaaacaaacaattaatggacagatgtttggaagacaaagtttacctcccagaattctatagacctttccagagatgtggaatgttagcatttttatttattttttatatttatttatttatttatttatttatttatttatttatttagagacggagtcttgctctgtcatccaggctggagtgcaatggcacgatctctgctcactgcaagctccgcctcctgggttcatgccattctcctgcctcagcctcccgagtagctgggactacaggcgcccaccaacatgcccggctaatttttctgtatttttagtagagacggggtttcaccgtgtcagccgggactgtctcgatctcctgacattgtgatccgcccgcctcgccctcccaaagtgctgggattacaggcgagtcaccgcgcctggcgcaattttgtttatatgattctgatatcgtcccatttaacacatcaaaaaatgcacaaatacatactttaaaaacattctacagttctttgacttttaaaaaatatctttcaaaaatctttttaagaatgcttgacattgtatctaccctcttaacatgcagacatgcacacgcagggtcatgcacacacacactggctgggactggcagaaggggccactgtggtgtgcctgcaagcctaggggtgggcccaggtggcaccatggcaggggcagatcttggtggtagtagtaaatattcaaatgagcgttttgaaggccaaagtggagaaggattccatgtgaaaagcagttgaacatgggtcagtcggtcctgagacaggcgagcatcatcccaaaggagtaggcattggcctcaatcgctgtcagtgatagaaagggagttgggtttggattcccaaatccagagtggcggagataggaaacaccaagttgccttctccagtgctgtatcctggaggagccggcaggagcccagggagagatctctttttcttgtgaagtgcagggcgtgctagaataaattcacagttctggagacttctagtggcacttgagaatccggggaagggggtgcaaatctccgtggcccatataccagcaggtctcccaggtgaacagcctctggacaaagtaggtaagggaagtcatccagccaatcacttacttgggaataaaaatgggctctaagggctcgtcaggtactcttgactggtgaatatggtttggatgtctgtcccctccaaatcacgtgttgcagtgtgatctccagtgcttaaggtaggatctggtgggaggtttttgcgtcatgggggtagatctctcatgagtggcttggtgcccttcctgaactgatgagtgagttctcactctattagttcacatgagagctggtggtttaagacagcctgtcatctcttgctctctctctcacatgtgacacagtggctcccctttgcctttggccatgattggaagctccctgaggcctcaccagaagcaggtgctagtgccatgcttcttgtacatcctgcagaactgtgagccaaataaccctcttctatataaattcccccagcctcaggtatttctttatagtgaagcaatatggactaacacactagataaggtgattaactttcccatcctcacccaggatcccctggaccttagatatctccagcctcctgcccccaaggaagggtggatgtagggccctagtgggagaaagggtcctgcagtgtcatggggtcgctgggttcagggactgtggctgtggacaggagctgggcctttcccatggatagccccagctgctgtgggcctcgtggctgcccagggagccccagtctccagcaaaacctcagccaagggaatgtgcttggaaggatcttggggaaagaccccagagactgagcgtggtctggcctggtgaggagacagaggagtctgctactcctgtggttttctccaatgaccagcaagagcatcctgacctccaggaattttcaccaccagctctggggaggtccactggtgtcccaaagcaggccagggttgacagaacttcccctggaacaaaagggggaaagtgcacttgattttcactttcaggatgaacgggaatgcagggcctctccatccttctaactacggggattttactcaggtgacgtcagacaagtcatacagggatccaggtgaagtgcacatccccatttaatgcagaaatacacaaattgagttccgatctcctgcctgtcagcacggcccctactaaccctgagacagcatcctcagattttcaaaatgaagggaacttcgctgtcagcaaacagctgtggtacccaggtgctctgccaaagaagcaaccaggaactttagaactgtgctcttcaaatgcctggcaacccctgcacttttctccgtgagaggtgatcagccagggtcagagtggaaacgctaaagaagagctccctgggagtgtgggcaccacgataagtctcatccccagacacctctccacagccactttgcctgaattgccaagtgaatggcggtgctgcaaacacttttgcttttagtaggtctttatgcaaggaaataaaaaatctcaggaccactcaactccttctgccaaagggaaagttaagcctggaggctgagtcactggcaacaccctcttccaaatgaattgctgttacttcacaaccttgtgtcaaagcattaggcattagctagacccccatggaagggcctcaggcatctccagatgacaacccccacaaagcactcataagtaaactcttatgtcaattgacttgacttactgtcaatcaaggaaaataacccaggcaagtctcaatcattttgggaggcctatttgccaaagttaaggatgcactcccagagacaggtctatgcctttctctgaagataattttggtggcttcaatatttaaaggggaatgggcggaatattgagaaatacacaactttcatgtgagagcggggtagggaaaaacagtcattcatgcctttgcctggctcagtgaatctgaatttttacatgagatgccatagaccatagggcagaggaaacagtaagatatgcatttgtctcacatgggcagaagcatgaatctgagctctgtcgtatgtcccagcacctgtgaagataagctatcaatttacattgccatggtgaactgcaagagaaacattttagagtaaagatcttgaggcccataaggatctttaccctaaaatgtgagggaggtatgtagcttttcatctttgcagccatcttatttgtgacccaaaatgggaggcaggtttgcatgcgctggttcccagcttgacttttccctctggctgagtgagtttgggagtctcaatatttattttcctttcacacacctttcaagatgtctttcttcccataaataaggacttgagatgtgcaatccaagtccagctcctaaaactaaagtctgttgttgcattccacgctgacaatgtccattacaagcttatcttccgaggggcagaacaaagtcggcatgagatcaaccattccttcccctaccaagagacatcagcataattgagacctcctttactcccctcttccttcaaacattcaccttatctgatgtaaaatgtaggtttactggacactaactaaagtctcacaagaatgtaacatttgccttgccacctacctgccccttttcctacatgcattcccccactttaaggaaatttatatgtacagaagctcctgaaaacttctccacaaaaaaacagccacaggtgcgtctctggcttgagtttttcctcagatgtgccctcaagctctagcttactaaacctcaaatcattgagccttgcctcagtcactcatttagggtaccatttataaacatgtgtgatgaggcccccaagtactcccatttttgctggagtgagaaccttccctctctcctcacagtgatgctgtagctgcctgatgggttcttcctggccactgcacaaaggagaccaatgcattgcagtaaagaaagagttgaacagatgtaaggctgctcacgccatgtgggagacaaaaattattactcaaatcaatctccttgggctggacatggtggctcacacctgtaatcccagcactttgggaggccaaggcaggcagatcacttgagtgcaggtcaggagttcgagaacagcctgtccaacatggtgaaaccccgcctctgttttaaaaatacaaaaattacctgggtgtggtggtgggtgcctgtaatcccagctactcgggaggctgaaggatgagaattgcttgaacccaggaggtggaggttgcagtgagctgagatggtgccactgcactccagcctggctgacagagagagactctgtctcaaaaaacaaaaacaaacaaacaaacagaagatcaatctccttgaaggctcatagggtaggggtttttcaaaagtagtttggtgggcagggggctagggtatgggaagtgctgattggttggttcagagatgaaatcaggggattgaagcttcctcttgcactgaatcatttctgggtggggccacaggagcagttggcagatcctggtgggtccaggtggagccattggtgtcagacatgcaaaaatcctgaaaagatatctcaaaaggccaatcttagattctacaatagtgatgttatctgcaggagtaagtggggaaattgcatgtcttgtgagctctggaataatggtagtgattgtttatgtgtactccttggcagaatccaggcttctcttcctcctagcctggtggtcactcactagctttacaaaggcaattgagttttgggaaagggctattaaaatttaaactataaactaaatgtctctcaaagttagcttggccgaagcccaggaataattaaaggcagcttgaaggctaaaggcaagagtggggttggctagatcagatctccccctctgccataattttctcactgttacaatttttgcaaagccagtttcaatgtgactggagggaggagagggtccttgttctcaggaaaacaaaatcagtctgtggagggagatctgtcctcccctgtggctactcagtgattatagcgctgcacagttgaccctcgaacaacacaggtttgaacggcatgagtccacttacacgcagctctttttcaaccgaatgaggatgaaaaatacagtattcatgggatgcaaagcccacatttacagagtgttgacttttcctgcaaggaggtttggcagggctgactgtggaagttgagtatgtggggatctggttatatgccattggtcctggaaccagtccccacatagatcaagggacgactgtatttgatattatttaggaagcttctgagctcagattggccattggttgaaagagttattatcaaagttctagaatcaatagaaaggagtgtctgtgttacaataagaggtggtggagaccaaggttttaggcaggcgaagcctccacgtagcaggcttcagagagaatagagtgttaatgtttcttgtcagacttgagagtctgttctgtcaatcttaaggcctctgtgttgatgttcatgctggtcagctgtgccagaattccaacagggagaagggtataatgaggcacacctgattcccccttctcatcatggcctgaactggttttgcaggttaactttgaaatgccctcggctaaggggaggggtctgtacagatgtttggggggcttagaatttaattttttgtttacagtggttttctgcagctcaccacttaacattaaatctgtttcctctgttcctaaattggcaagctgatcttatctattcaaatgcagaaaatcttttttttttttttgagacggagtctcactgtcacccaggctggagtgcagtggcacaatcttggctcactgcaaactccacctcctgggttcaagcgattctcctgcctcacctcccaagtagctgggattacagacacacgccaccatgcccagctaatttttgtatttttagtagagatggggtttcaccatgttagccaggctggtcttgaactccttacctcaagtgatccacctgccttggcctcccaaagtgctgggattacaggcgtgatccactgtacctggctcaaatgcagaaattctgaagcctgaagtccctgtacagttggagcttttgataaaacttcaggtttctttaaagggccttcttcaacactccacccctaggctgtgttcaaaactgcagcgtaactgagaaaacggtggcagcctggggtgaatgcagtccctcccttttcctaatccatgaaactcctctacatgaaaaccacttgaaagttacagacatggagggagggactttatgtcttccttgggggcagccaagacaaagagggatgctaagcagattatcttggtattaatcattcaaatgcaggagtggagacttcaggactcaggcctagcaggggaaggttgtggctcatgaacccctgcttacagcctggcaccctcctactgcaaccgtgctctacggacaggttttcatcattcatcctcatgttccacaaggtgttccagaaatcctctgccccattccacacacccaccgcagtagcctggtcaagtgatttcaagtgggtcctcaccactaaaaagaggaagatggacaaacttttactcgcgtccttgtgaagagcccaccaaacaggctttatgtgagcaataaagcttttaatcacctgggtgcagtcgggctgagtccgaaaagagagtcagcaaagggagataggggtggggccgttttataggatttgggtaggtaaaggaaaattagtcaaagggggttgttctctggctggcaggggtgggggtcacaaggtgctcagtgggggagcttttgagccaggatgagccaggagaaggaatttcgcaaggtaatgtcatcagttaaggcgggaacaggtcattttcatctcttttgtgattcttcagttacttcaggccatctggatgtatacgtgcaggtcacaggggatatgatggcttagcttgagctcagaggcctgacacaaacatgagtgaacgccacaaatggcacctccatatgaggaactggggcaaaaggaatagagcgagggggcttttgtttggcaaattgtgcctctaagacccactctcagggttgtattaaaaaatgtaatcgatgtttaaaaagctaacacagagcacaggtatttgaggactaagctctgatttttttcttatcttgcccaaattcctatctaaagggtctggagagtcatgctctacaaaccataaattctcatcagatgagttttatttaaccctatatatcgtgacttactttccaatctgactctggcataacatcacatgacaaaacagaaaatcaaaatattttacccccaaacaagtttatttgccataccttgaaatggccctgcaaagccatcctttgtgggggagaaatttgcatctgtaaagaatctctattaacatagctagatctttttgtttcaggccctcccagttctgaagagattagctgagagtctaccagctttttaaaggtcagaatgggaaacatttgtcatctattgtctctaagggcagccactatgagacatcaaaagaaccttggtctccacaatcttttatcttaacctaaacatttcctttctattaatcccaggtctttagacaaactcaaccaattgtcaaccagaaaatgtttaaatttacctatagcctggaaccccaccccccttcaaattgtcctccgtttctggaccaaacaaatgtatttctcaaatgtatttgattgatgtctcatgcatctctaaaatgtataaaaccaggcttctgcaccccagccactttggacacatgttctcaggacctcctgagggctgtgtcatgggccatggtcactcatatttggctcagaataaatctcttcaaatatcttacagagtttgactctttttgtcaacatattgttctgagtgattttattgtccccacatgaaactcacagaacctctgtgagttgggctccattgccttcctctttgcatgtagagtgtgggaatctaagacatgccctcagcccacaaatgatggccagtgacaagtaggggctcaaattcaagtagtccagtgccaaagaaacttgataacccctcttagggtgtagccattatgcactttggctcattttccttcctggtgacttcagatcaattgtggagaagaaggagctggatgagctttgggtgggtcatttatggtgagcaacacttacagaaagagcctgtaaacctctgtgttgtcactctgtctctttcctgccatacacagattcctttatgaacataggcattaaagggtattatttaaggaagtgttcttcccacaaccttaatttttaaaaatttatctcttttttgagacaaagtctcactctgtcacccaggctggagtgcagtggtgtgaacactgcagccttgacctcctggcctcaagcaaacctcccacctcagcctcccaagtagctggaactgcaggtgtgtgctgccatgcctggctaatttttgtatcttttgtagagacagggtctccccatgtggcccaggctggtctcacactcctgggctcaagcgatctgcctgcctcagcctcccaaagtgctgggattacaggtgtgagccaccgtgcctatccttattttcatttttaacatgacacagccagctataaattctgtgggaaacaacgccctgtgggataagatcatcactttctatttttcctttaataaaagtcaccctaaatgggactcaataaaaataattatttgctgccaaaatgaaagtcaaaactgagaaatagaaaaatcaaagataaaaatccactgtaatgaagactcacaaaagatcaactgagagaaatgtttgccacatttatggaaaatatagagttagtgaacaaattaaggaattaagggctcgaggcttatttaccatcactgcagaaaccacactcaatgtgtaagaggcggggtccaaggcggcagacctctgctggacttctgtgatccctgctactttctggcaggggcacactgggttcagagacttgtcctacattcagttggcagtgggaccttggataggtcatcctctctgagccctaataaattcaccaataaactggaaacatctcctgattggtcacgggtggaaggtcagtgggatggagaaggatgactgtgggcagctgggagtacttccctagagggagccaagtgggcaagcagccccagcatgatgtcacagatggcccattgtgacttatatttaaaatttatattcaaaagggaagcagagcataaaagtttggaaattttgcagcttgagcatgtggcagaaaaagtaaaagcactatcaggggaagaattaaagcaggctgcagaataatcatttgctagagaaatttgcataactgaaagggagccaagtgctaattaacagccaagacaatgggaaaagggcctcaaaggcatttcacagacctttaaggaagctcctcccatcacaggtgcagaggcctagaaagaaagaatggttttatgggcccagcctgaagtgtgccctgtgccacttagggaggctccagctccagccatggctcaaagggccctagggacagcttgggccacagccacagagggtgcaagccataagccttggtggcttccatgtggtgttaagcttgtaggctggcagagtacaacagtgaatgaggcttggcagcttccccctagatttcagaggatgtatgagaaagcctgggtgcccaagcagaaacctacagcagggctggagccctcagagagaacctctactagcacagtattgcccagcctcaggtattcctttatagcaatgcaagaatggcctaacacaaccagaaagcctcaggacctttggccaacaagcgaatagaaactagtgtgtgggacagagcaccatgtggcaaacacctgagtagaaagagaaaacctccgaagaggtggaatagtggaaatgtggggttggaggccccacacacaaaatccccactggtgcactgtttagtggagctctgggaaggggggctaatgtcctccaggccctggaatggtagagccactggcagcttgtacccttgtgcccagaaaactgtgacaggagcgacgggagctgaaccttgcaaagccacaggggcggagctgcccaaagccttgggagtccagacctcatgccagtgtccctggatgtgggacatggagtcaaaggagattcttttagagtttaagttttttttgttttgtttttgttttttgttattttgagacagggtcttgttctgttgtccaggctggagtgcaatggtgtgatcttggcttactgcaacctccacctcccaggctcgaacgatcctcccacctcagccttctgagtagctgggaccacaggtgcacaccaccatacccagattatatatatatatgtatgtttatatatataatatatatgtgtatgtttatacattatatataatatgtataatatatgtgtgtgtatgtttatatataatatataatattaatattatatgatatattatatatataatattatatatatgtgtgtgtgtatatatatgtagagatgaagtttagctatgctgtccaggctggtctcaaactctcaagctcaagtgatccacctgcctcggcctctcaaagtgctaggattacaggcatgatccaccatgcccagcctggagctttaagatttaatgactgccctactgagtttctgacttaattggagcctgtagccctttccttttggccaatttctcccttttggaacaggaatgtttacccaatgcccacttccccattgtatcttagaagtaaataacttgttttgattttacaggcttatagatggaggaaggaaatgagtctcagatgaaactctggacctggacatgggactttgtgttaatgctggaatgagttaagactttgggagactattggggccaggcatggtggctcatgcctgtaatcccagcacttcgggaggccaagacaggtggatcacttgaagccagttggtcagaccagcctgaccaacatggtgataccccgcatctactaaaaatacaaaaattagccagacacggtggcgcatgcctgtaatcccagctactcggattgctgaggcatgagaatcacttgaacccaggaggcagaggttgcagtgagccaagatagtgccactgcactccggcctgggcaacagagtgaggcactgtctaaaaaaaaaaaagactttgggagactattgggaaggcatgattgtattttgcaatgtgagaagaatataagatttggaggggccaggggcagaatgatagagtttggatgtttgtccctgcccaaacctcacgttgagatgtaatccccaatgttggaggtggggcttggagggaggtgcttggatcgtgggagcagattcttcgtggcttggtgctgtcctcgtgatagtgagttctgctgaggtctggttgtttaagtgtgcagcttcactggtgcaatgctttctctgcttctgctttccccatgtgacatgctgctctcacttccccttccaccacaagtaaaagctctgacacctccccagaagctgagcaaatgctggtgccctgcttcctgtacagcctgcagaaccgtgagccacttaaacctcttttctttatattaggttggtgcaaaagtaatttgcagcttttgcattaagaaaaagtagcaaaaactgcaattatgtttgcaccaatccaataaattgcccagcctcaggtattcctttatagaaatgcaagaatgacctaacacatccagagagcctcaggacacctgggcaacaggggaatagaagccagggtgtgggacagagcattgtgtactgaacacctgagtaggaagaggaaacctccgctgggtgtggtggctcatgcctgtaatcccagcactttgggaggctgaggcaggtggatcacctgaggttgggagtttgagaccagcctggtcaacatggtgaaaacctgtctctactaaaaatacaaaaattaaccaagcgtggtggcgcatgcctgtaatccctgctactcgggaggttgaggcaggagaatcacttgaacccgggaggtggaggttgtggtgagccgagatcatgccattgcactccagcctgggccacaagagccaaactccatctcaaaaaaaaaagaaaaaagaaaacctccaaggaggaaccctgtagaaaactgcaatgtgacacgtgttcactgcacgtggcacaagccggagaagaaaatgtaaataaagcctaggaacaaaaactcagagccctaatgagtaagtttggatttgcaggagaggggaaagacacgcttggcactcacagcctcactgagtacattttctccacctaagtgagtccacatgttaatttactcatcggggagcagccagcacaaagcctgtcccccccagtgatatgaacaccctggccaggcacatgcagccagcagtgcatcctcactgggaccatatccatggctcctgtgctctgcgactctgctcctgcctgggtaaggcttctgtccccacaaagaccaccactgttctgcttttctcccactctgggtaagttttgcctattctggaacctcctattcatgggctcatacaatatgttctccgttgggaactatgttctttttgtgcagcgtgaggctgtgtgtgccagcggtgcttttattgctgagcagtgttccattgtgtgcctgaccacagattgcttttcattctgctattggtggaatcctgggatatttccagtttggggatactatgaatgaagctgctatgaacatccttatacgaatcttctggtgaagtcatcatagaatttggagaccaagtttttgccatcatttattcggagcctaaaggaccagacgaaaaacctgcccagggtcacacaagactgagaagcccagtaaagcactctctgacgtcagcgactcaggtcctttggtcctgtgcctggcttggacagagtcaggcttgttcaacactctctccccatcacctcaggttccccatatcccatttacaacatcaggattagctcccaggcttctgtggggtgaagaatggggactggttttcctgtttcacttttagcctgggcttaggctatgagcaggtcagaaaggggcaatgaggctggttgcagtggctcatgcctgtaatcccagcactttgggaggccaaggcgggtggatcacctgaggtcaggagttcaagaccagcctggccaacatggcaaaaccccatttctactaaaatacaaaaattagctgggggtggtggtgcatctctctaatcccagctattgggaggctgaggcaggattgcttgaacctgggaggcggaggtttcagtgagctgagatcacgccactgcactccagcctgggtgacagagcgagacttcatctcaaaaaaaaagtggggggggggtggcaaggagagcaatgagatcatatttcccatgtgctgtgtgaacactggtgctctgtgaaagggccacatacgcaaagcagccccaaacgcagaaggagctgagaaaccaaagaacaaggcacacacatccagtgtgtcagcaaagggtggtttatttggggaatttaaggcagaagcatggtcttgggtgacagcaagacaggtgtccacactcccagacccagggcttgtacaccatggagaaagtgtgcattgctctacagagacaatggcagcaatccagagcaggcaggaatgctgtgcatcatagcctagaatttgtgtgataacatcagggttgacacgttctcacactaaggacaggaaattaagtccaggccctttcatggaacaccagtgttccatggtgttcctgattaagtgtaggaatcaggaggcattcctgggactggagctaatcagagtcaacacggcaggtttgcagcccaaatggtcactttgtctctgcagttggtgtctcccttcccttctgagtctcattaaccccatgtgcaaatgaaggggattaaggtcactctggggctcattctgggcctaatggtctctgaggttaaccatccatgatgggtaaagtgaagaggggtgtctttcccctctgcttgctccagtcacttggcccagaggcccccctccaagtgagctccaggagggctcctgcatactcctctcccagaacacagctccaaggatgccatgatgatcagtgttttaaaatgtacctggtagttgctttttatacagatatggcaaggcttacagatctggagacatttgccattgaaaactagttacttgagcacggtggctcatgcctgtaatcccagcactttgggaggccaaggtgggtggatcacctgaggtcatgagtttgagaccagcctggccaacatggcaaaaccctgtctctactgaaaatacaaaaattagcctgacttggtggtgggtgcccgtaatcccagctactcgagaaactgaggcaggagactcacttgaaccccgggggatggaggaggttggggtaagctgagattgtaccacttcactccagcctgggcaaaagagcaaaactccatctcaaaaaggaaaagaaaagaaagctaattacttggccaggcatggtagctcacccccagcactttgggaggctgagacagcccagaagtttaagaccaacctgggcaacatggcaaaaccctctgtctacaaaaatacaaaaattagccaggcgtggtagcacgtgcctgtagtcccagctactcaggaggctgaggcagaaggatcacttgcaccaggaggtggaggctgcagtgaactgtgattgtgccactgcactccagcctgggtgacagagtgagactgtgaggaccccaccacaaaaaaaaaaagaaaaaaaaaagttacagttctcaagaggagggagcacgccaccccatgcagggccatgcagagaagcattgaggttggccagaaggcaggagcgaggggaaggcgtggataaaaggctttattgggttttctctggaaggaatgggcaaggcaaggtgagtaggcttagggttggttagtttgaataatttccgcaggctctgcggtgtagagtgtcccaagttgtctgttacctggccctgggatgatctggggtgcagaggagctgcagagccagccagcctgtggaactcctggcagggtttcctgtaggcactgctcacctctcctctgccttcccagagcttcactgccaatgagcagaaagtccaaggaattgggagtgtatctgcagagacccatcttaaactatgtacaggcttccagaagacagtcatttaactggagaccaagttaggctgtgggttggagagggctggaagaaaatgacagtgaaatttgtttttccaccaagagacatagtgcctctgttgggaggtgggggagcttctacactgaagtgggttaatctctgaactgctcctctagggctgaggccccccagccgtgcatgatgccctgagcagaagggtctgaccaggagagggcaccagagcagagtgcgggtcaaagttgctaaagcccacaccacgggtggcctggggctctggggatcccctggagtggctgtggattgttgagcctggcaatatattgtgcatcatttttttttttttttttgagacagagtctcactctgtagcccaggctggagtgcagtggcaggatcacggctcactgcaacctccgcctcctgggttcaagctattctcctgccttggcctcctgagtacctgggattacaggcgtgcgccaccacacccagctaatttttgtacttttagtagagacggggtttcaccatgttggccaggctggtctcgaactcctgacctcgtgatccacccgccttggcctcccaaagtgctggggttacaggtgtgagccaccgcacctggcctacttttttttttttgaaacagagtctcactctatcacccaggctggagtgcagtggcatgatctcagcccactacaacctccatctcccgagtattctccagcctcagcctcccaagtagctggaattatagacatgcaccaccacgcctggctaatttttgtattttttgtagagatgaggtttcaccatgttggccaggctggtcttgaactcaggtgatccacctgcctcagcctcccaaagtgctgggattacaggtgtgagccaccactcctggctttttgtatttttttttttttttgagatggagttttgctcttgttgcacaggctggagtacaatggcgcgatctcagctcactgcaaactccacctcccgggttcaagcaattctcctgcctcagcctcctgagttgctggtattacaggtgtacaccaccacacccggctaatttttggtatttttagtagagattttggctagtttttggtatttttagtagagacggggtctcaccatgttgacaggagttcaaggctggtcttgaactcctgaccttgtgatctgcctgtctcggcctcccaaagtgttgggattacaggcatgagccaccgcacccggcccgctttttgtattcttttaaaatagagaagtggtttcaccatgttgatcaggctggtcttgaactcctgacctcaagtgattctcctgtctcggccttccaaagtgctgggattacagacatgagcctgtgcattggatttatctgatttcaaaaatctcaaagacccaggaaatgcatgaattagtatgacaaaagatccccccacatgcgaatatttgaaccctagaaaatctgagccagggctgggcgcagaggctcacgcctgtaatcccaggactttgggaggccgaggtgggcagatcacgaggtcaagagattgagaccatcctggccaacacggtgaaaccctgtctcttaaaaacacaaaattagctaggcgtggtagcacgcacctgtaatcccagctactcgggaggctgaggcaggagaaacacttgaacccaggaggcggagtttgtggagagctgagatctcgagatctcgcctttgcactccagcctggcgacagagcaagactccatctcaaaaaaaaaaaaaaaaaaaagaaaatctgacccatgtgtgacctcacaaatcatccatccaaaatgttcattctacagatagggaacccatgacccaaagaataaagcttgtccaagatcaaactgaagcccaggatttgggaatagaaaccaaggggcaaggaggtaaatgggatgtccatcacttatttatttatttagagacggagtttcactgttgttgcccaggctggagtacagtgacgcgatctcggctcactgcaaccttcgcctcccagattcaagtgattctactgcctcaccctcccgagtcactgggactacaggcatgcgccactacacccaggtactttttttgtatattttgtagagacagggtttcaccatattggccaggctggtcttgaactcctgacctcaggtgatccatccacttggcctcccaaagtgctgggattacaggcgtgagccactgcgcccaacccgggtcaccaatttcaggggctggaaaatcaagcacaggcttattcctccctcggtgcctggagtgccctctaatggctagttcaataaccgcctcgaacatcttaaggtaagacacgacatagtcatgaatatttaaagtccttcactgctctccaggaacctcccctccttcattagtgtatgtgtgggggaaacatacacatcactgaaatttaagtgccatcatgatgaacctttttttttttttttgagacggagtcttgttctgtcgcccaggctgtagtgcagtggcatcatctcggctcactgcaagctctgcctcccgggttcacgtcattctcctgcctcagcctcccgagtagctgggactacaggctcccgccaccacgcccggctaatttttgtatttttagtagagatggagtttcactgtgttagccaggatggtctccatctcctgacctcgtgatccgcccgcctcggccttccaaagtgctgggattacaggcgtgagccaccgcgcccggccgaacctttttttttgagacagggtttggctctgtctctcaggttgcagtgcagtggtgagatcatagctcactgcagccttgacctgccggcctcaagccgtcctcccacctcagcctcctgagtagatgggatgacaggcgcacaccaccatgcctggctaatttttgtactttttctagaaacggagtctctctatgttgcccaggcttgtctcaaactcctgagctcaagccatcttctggccttggcctcgcaaagtgctgaaattatgggcgtgagcctggcgaggatgaatattttgtctgctttgttcaggatagtggtctctgtgtccatggcagtgaccacacccatgcataatagacattgaataaatacttgctgaatggctgaatgaattaagtactcactctgcacacagctctatttctggatttttgaggtgcttcaatcaacagatatttaccagtggctttctgtgtgcaatataccatgaagagagtcatggagtcagaaaaattttaaagccactgttcatgtcctaatagagttgccgtttattagtgtacaagacaaaccacaaatcctaagtgtagagataacatggcaaagatgagaggggtgagcaaagccatggcggcgagccaggcagacagacggactgcagccaggctccggggcctcccggggagatggggtgcacgtccaggtgggagaagtcggctttcagaacaggagaagggacggctttccagggctggggccagtgcctgcctcattttccatctctcaattccgcattcttcctcctcactcaccacagtcgtgggggctgaattcccgaattactaagactcgcctctctcggggaactcggtcgctgtccttaccacctctccgatggctcctcccatccctggccacgtccacctttggatgcttcttgccgtcacacagtcccacacccagctgcgcaactgagcactcacagtgtttagaatcctgcagccgctggccccaggctttgactccacgggctgaggcctttaaggacatcagcaggaccgagccaaaggagctccgcccacccagccagagaacactgatgcagggagatggaaacaggatttagttactgagaccttgtttacacaaagatactccaagagaactcatggatgggagggagttgagtcttggctgcggaagcaggcgaaaagagaagtaaaccgatctccatggaccgtggagcggttctgggcaggtggcactgtaggaagaagacaggagcaacggctagatggaaggcaggcgtgctttgagtgtggcagacagcgggagactgggttcagcaggaccctaggggttccaggtcatgtcacagctttattaagatataattcaggccgggcgctgtggctcacgcctataatcccagcactttgggaggctgaggtgggcagatcacctgaggtcgggagttcgagaccagcctgaccaacatggagaaaccccgtctctactaaaaaatacaaataaaattagctgggcgtggtggcgcatgcctgtaatcccagctacttggaaggctgaggcaggagaagagcttgaacctgggaagcagaggttgcagtgagccaagatcgcaccattgcactccaacctgggcaacaagagcgaaactccgtctcaaaaaaaaaaaaaaaaaaaaaaaaaggatataattcatatacaattcatcaacataaagtgagcagtcaatagtttttaatatattcacagagcagagctaccatcaacacaatcaattctagaacatttccatcaccccaaacaggaactctgtcctcattagtcgtcattcccaaatcccccacgtccactgcagccctagacaccactaatctacttcctgtctctaagattgcctattatggacttccatataaatggagtcggttgggcgcaatggctcacgcttgtagtctcagcactttgggagaacaaggcgggtggatcacccgagttcaggagttcgagaccagcctggccaacatggcgaaaccccatctctactaaaaatacaaaaattagctgggggtgatggtgggtgcctataatcccagctactcgggaggctgaggcaggagaatcacttgaacccgaggggcggaggttgcagtgggctgagattgcaccattgcaccccagcctgggcgaaagaatgaaactccgtcacacacacacacacacacacacacacacacccataaatggagtgtacacatggtcctctgtgactgccttctttcctttgcatgtgcttccaaagttcatccatgttggagcatggatcggtatctcattccttttcatggctggagaatattccagtgtaggatacaccacatttggtaatcagctgatggacatttgggttgtttccatctttggctaccgtgaacataccatgaatgtttaggtaagagtttttgtgtgcatatatattttcattttttttgatataatctaagtggatttgctgggtcaaatggtgacactgtttagtttgggaactgccagtctatctcccaaaggggcttcaacactttacattcccaccaatagcatttaagggtttcatttgtcaacacttctccaacttcttgccaacacttgttatgacttgtctttttttactatacccatcctagtgggtgtcaagtggcatctcaatgtggtttggatttagacttccatgatgacaattgatactgagcatctttccatgggcgttgggcagtttgtttgtgtgtgtgtatatgtgtgtatatatatatatatatatatacattttttttttgagacagcgttttgctcatgttgcccaggctggagagcagtggtgcaatctctgctcactgcaacctctgcctcctgggttcaaccaattcccctccctcagcctcccgagcctcctgagtagctgggattacaggcatctaccaccaggcccggctaatattttgtattttagtagagacagggtttcaccactttggccaggctggtctcgaactcctgaccttaggtgatccacccacctcagcctcccaaagtgctgggattacaggcgtgagccaccgcgcccggccagtttgtatatcttctttggggaaatttcagatcttttgtctattttaaaaatccagttatttgtctttttattattgcattgtaagagttctttatatatttgatatgtttgggtcacaggggcagatccctcatgaatggctcagtgccctccccatggtaataagtgagttctcactctgttagttcactagagaactggttgttaaaaggagcctggcacctcctcgcctctctcccactctcccacttgccatgtgatgtgcctattccctctttgccttctgccatgatcgtaagcttcctgaggcctcctcagaagctgagcagatgcggctgcctgcttgtacagcctgcagaactgtgaaccaaatagatgtctttgtaaattacccagtctcaggtatttatttatagcagtgcaaaaaggactaacacaatattctagatatgaattccttgtcaggtatatgatttgcaaatattttctcccattttgtgggctgtcttttcattttattggtagtgtcctttgaaacacagaagtttttaattttcatgaagccgaatgtatctattttttattatgtcgtttatgcttttggcatcatatctaagaatccaagctcacaaaatcttagccctatgttttcttctaaaagagttacagttcgggctcttacattttggtctttggtctattttgacttaattttgtacatgacatgaagtgggcatacaacttcattcttttgcatgtggatatccagttatcccagaaccatttgttgaaaagactattatttttccactgaatggtctttgcagccctgttgaaaatcagttgaccatagatacatgaatttatttctggactctcaattttattccattgatctatatgtctatcctcatgccagtaccaccgtctcttagttactgttgctttatagtaaattttgaaatccagaagtatgagtcctccaactttgttctgttttcaagattgttttggctacgctgctgcattgagtacccacacagattttagaaccagcttgtcagtttcctcaaaggatccagtcattattttgataggattgcattgattctctagatcaatttcagaagtaccaacatcttaacaatattcccacccatgaacgtggaaagttttatttaggtctttctaaatttctttcaatgaaattttgtagtttttagagtataaattttatacctctcttattaaatttattcctatgtactttactattttgaggatatttaaaatgtaattattttcttaattttatttttgaattattcattgctagtatatatttttttatttttaatttcttttttttaacatttttttaagagatgggatcttgctatgttgcccaggctggtcgtgaactgctgagttcaagcactcctccttggcctcccaaagtgctgggattataggtgtgagccaccacacccagcccattgctagtatgtagaaatacaatggatttggctgggcgcagcagctgatgcctgtaatcccagcactttgggaggcagaggtgggcggatcatgaggtcaagagatcaagaccattctggccaacatggtgaaaccccatctctactaaaagtacaaagattagctgggcgtggtggcgctcgcctgtagtcccagctactcgggaggctgaggcaggagaattgcttgaacctgggaggcggaggttgcagtgagctgagatcacgccactgcactccagcctggcgacagagtgagaatctgtctgaaaaaaaaaaaaaaaaaaaaaaaaaaaaagcaatggatttttgcatagcaatcttttatcctgcaaacttgtggaattaaaacgttttagtggattccttaggattttctgcatatcctgtggattcatctggaatagggatagttttacttcttcctttccaatctagatgacttttatttcttgtttttgtttaaaatctctactacaaggtttaaaagaagtgatggtcttctaagttcttgatcttaggactggggtaaaacatctgtctttcactattaagtgcaatgttagctgtaggcttttcttaaggtgccctttagaaaaatcccacgctccctctccctccccctcccccctccctctccctctccccacggtctccctctccccacggtgtccctctccctctctttccacggtctccctctgatgccgagccgaagctggactgtgctgctgccatctcggctcactgcaaacctccctgcctgattctccttcctcagcctgcctagtgcctgcgattgcaggcgcgcgccgccacgcctgactggttttcgtatttttttggtggagacggggtttcgctgtgttggccgggctggtctccagctcctaaccgcgagtgatccgccagcctcggcctcccgaggtgccgggattgcagacggagtctcgttaactcagtgctcaatgttgcccaggctggagtgcagtggcgtgatctcggctccctacaacctccacctcccagccgcctgccttggccccccaaagtgccgagattgcagcctctgcccagccgccaccccgtctgggaagtgaggagcgtctctgcccagccgcccatcatctgggatgtgaggagcacctctgcctggctgcccagtctggaaagtgaggagcgtctcttcccggccgccatcccatctaggaagtgaggagcgtctctgcccggccacccatcgtctgagatgtggggagcgcctctgccccgccgccccgtctgggatgtgaggagcgtctccgcccggcagccaccccgtccgggagggaggtgggggtcagccccccgcccggccagctgccccgtccgggagggaggtgggggggtcagcccccggcccggccagccgccccgtccgggaggtgaggggcgcctctgcccggccgcccctactgggaagtgaggagcccctctgcccggccaccaccccgtctgggaggtgtacccaacagctcattgagaacgggccatgatgacaatggcggtttggtggaatagaaaggggggaaaggcggggaaaagattgagaaatcggatggttgctgtgtctgtgtagaaagtagaagacatgggagactttttttttgttctgtactaagaaaaattcttctgccttgggatcctgttgatctatgaccttacccccaaccctgtgctctctgaaacatgtgctgtgtccactcagggttaaatggattaagggtggtgcaagatgtgctttgttaaacagatgcttgaaggcagcatgctcgttaagagtcatcaccattccctaatctcaagtacccagggacacaaacactgcggaaggccgcagggtcctctgcctaggaaaaccagagacctttgttcacttgtttatctgctgaccttccctccactattgtcctatgaccctgccaaatccccctctgcgagaaacacccaagaatgatcaataaaaaaataaataaaaataaaaataaaaataaaaatcccacgctattccaagactgttggatgctgacttccctttcctagactttattgtgaaagggtgttggattttgtcaaatgctttttccatgtctattggattttttagattctattgatatggtgtcttacattaattgattttgggattttaaaccagcctgatattccctggacaaatcccacttaggcatgtcatatagctctttttacattttgctgaatgtggtttgctctggattttgttgaggatttttttcctctatatttagattagacattgatctgtagtttgcttttcttgtgatatctttgatttgggtagcagggtaatactggcctcatagaatgagctaggaaatgttccctcttcttctgtcttttggaagagtttgtaaagaatttatattacttctttaaatgttcaggagaattttcctgtaaagccctctgggactaggctttcctttgtgggtagtttactaattcaatctcttgttataagtttattcatattttctgtttcttgtgtcagttttggtaatttgtgtgtctctaagaatttgcccatttcatctaacttacctaatttgttagcacttaagtgttcgtagtattccttcataatcctttttgttggtagtaacgtccccattcattctagtccttcatttctaattctagaatggagaagaatatgtgttctactgttgttgggtggagtgttctaaatgtgtctattagttgattcataatgatgctcaagccttctattttcttcttgctcttctaattgttctatctattaaaagtgggtggagccgggcacagtggctcacgcctgtaatcccaacaccttgggaggctgaggtgggcagatcacctgaggtcaggtgttcaagaccagcctggttaacgtggagaaaccccgtctctactaaaaatacaaaattagccgggtatggtggcgcatacctgtaatcccacctactctggaggctgaggcaggagaatctcttgaacccaggaggtggaggttgcagtgagccgagatctcaccattgctctccagcctgggcaacgagaacgaaactccgtctcaataaataaataaattaattaattaattaaatgtggggtactgaagtctccaactattattaacagctttatatttatcccttcaattcatgtattttgggactctgttgctaggtacatatattatttataattgttattcttctggatgaattttgtcaatacagatgctcctcaacttaaacaatgggattacatcctgataagcttattgtaagttgaaaatttggtacgttgaaaatgcatttaatatactgaacctactaaacatcacagtttagcctagcctatcttaaacaagctcagaacacttacattagcctagagttggacaaaatcatctaacacaaagcctattttataataaagtgttgaatatctcatgtaatttattgaatattgtactgaaagtgaaaaacagggcctctaatccgcggctctggccaggcccaccgtgccctgcactgggggtcctggcagccactaaatatttttgtttaatttttttaaaaatcaaaagtatgaagtatggtttctactgaatgtgtcctgctttcccaccatcataaacttgaaaattttatccaaatcattttagtcggggaccatctgtatgtaatgttccaatttgtctgtggtaaagttagtttgttttgtttggttggttttggtttttttgagacagggtcttggtctgccacccaggctagagtgaagtgtgtgaccatagctcactgtaactgtgaactcctgggctcaagcaatcttcctgcctcagccctttttctggggcaggtgtttcgggggacaggatcttgctctgttgcccaggctggagtgcagtggtgcaatcttggctcactgcaacctccgcctcccagtttcaagcgattcttatgcctcagcctcttgagtagctgggattacaggcacatgccaccactcccagctaatttttgtatttttgtggagatggggtttcgtcatattggccagggtggtctcgaactcctgacctcaagtgatccacctgcctcagcctccaaagtgctcggattacaggcgtgaaccactgcgcctggcctataaagaataacttctgacattttgctatttgttttccatatgccctacatctctctcctccttcaattagttcattaactgcggtttcttgtgtttgattttttctagagtattttttgttgttgtatctaccaacttagcacatttcaagtctttaatatactattgttaactacattcacattgctgtacattagatccacatcctcactaacatgttcttttgtctttttcataatagccattttaacaggtgtgaggtgatacctaattgtgggtttgatttgtatttccctaatgattggtggtgttgagtgccctttcatatacctactggctactgtatgtatgtcttcttttttttttttttttttgagatggagtctcactctgtcacccaggctggagtacagaggtatgatctcaggtcactgcaacccccacctttggggcccaagcaattctcctgcctcagcctcccatgtagctgggaaaacaggtatgtcccaccacactggctaatttttgtattttcagtagagacagggttttaccatgttggccaggctggtccaactcctgagctcaagggatccatctgcctgccttggccttcaacagtgctgggatataggcatgagccaccatgcctggcctgtatgtcttcttctgagaaatgtctattcaggtcttttgcccatttagaaactgaattgtggccaggcacgatggctcacgcctgtaatcccagcactttgggaggccaaggcgggtggatagtctgaggtcaggagttcaagaccagcctggccaatatggtgaaattatctctacttaaaaaataaaaaaattagccaggcactggtaatcccaactactcggaaggcttgaaccaactacaggagaatcgcttgaacctgggaggtggaggttccggtgagccaagatcatgtcactgtactccagcctgggcaacagagcaagactccatctcaaaaataataaattaaaaaattaaaattgtgttatttgggtttttttgtttatttggctgagttgtatgagttccttatatattttggatatttatttaccccttatcagatgcatggttttcaaatactttctctcatcccataggttgccttttccactcttttgtttcctttgctgtgcagaagcttttcagtttgatgcagtccacttgtctatttttgcctttttgcttgtgcttttagtgtcgtgtccaaaaaaatcattacccaggtcaatgtcaagaagcttacccctgtgttttcttcttctaatagttttgtagtctccagtcttaggtttttgtctttaatctatttttagttgatttttgtacataatgtgaggtaaagttccagtttcattcttctgcatgtggatatccagttttcccaacactgaagagataatcctttcctcactgtgttttcttggcatccttgtcaaagataagttgaccatagattagtggatttatttctgggttttctattctgttctataggtctatatgtctgttttatgccagtaccatactattttgattaatgtagctttgtaatatattttgggtttttgttgttgttttgtttttgagataatgtcttgttctgtcacccaggctggaatgcagagctgtgatcattgtaacctccaactcctgggctcaagcaatcctcccacctcagcctcctgggtagctaggactgtaggtgcatgtcactatgcccagtttaaattttttgcagagacaggatctttctatgttgcccaggctggttatgaactcttgtaatatattttgaaaacaagaattgtgatgcctctagcttttcttcttgctcaaggatgctttggctatttgaggtcttttgtggttccatatgaattttaggatatttttctatttctgtaaagaatgccattgaggctgggtgcagtggctcatgcctgtaatcccagcactttggaaggccaaggtgggcggatcacctgaggtcaggagtttgagaccagcctggccaacatggtgaaaccccgtctctactaaagatacaaaaaattagctgggtgtggtggcgtgcacctgtaatcccggctacttgggaggctggagcaggagaatcgcttgaacccaggaggcaaaggttgcaatgagccaagatcgtgtcatctaggctacaagagtgaaacttcatctcaaaaaaataaataaataaaaataaaaaataggctgggcggccgggcacagtggctcatgcctgtaatctcagcactttgggaggccgaggtgggtggatcacgaggtcaggagattgagaccatcctggctaacatggtgaaaccccgtctctactaaaaataccaaaaaaaaaaattagccaggtgtggtggtaggcgcctgtaatcccagctactcaggaggctgaggcaggagaatggcgtgagcccgggaggcggagcttgcagtgagccgagattgcgccactgcactccagcctgggcaactgagcaagactgtgtctaaaaaaaaaaaaaaaaaaaataggctgggcgcagtggctcatgcctataatcccagaactttgggaggccaaggcaggcggatcacctgaattcaggagttcgagaccagcctgaccaacatggagaaacctcatctctactaaaataaataaataaatacatacatacatacataaataaatacaaaattagtcgagtgtagtggcgcatgcctgtaatcccagctactcgggaggctgaggcagaagaatctcttgaacctgggaggtggaggttgcagtgagccgagatcatgccattgcactccaacctgagtgacaagagtgaaactctgtctcaaaaaaataaaagaaatacaataaaagaaaaaataaataaactttcctctccttaacccactcatgtgtatgtgtcgttaatcttctcagcatgagatgacaaactccatctctactaaaaatacaaaaattagctgggcatggtggtgcacgcctgtaatcccagcactttgggaggccaaggtgggtggatcatctgaggtcaggagtttgagaacagcctggccaacatggtgaaaccccttctctactaaagatacaaaaaattagctgggcacggtggcgcccgcctgtaatcccggctacttgggaggctggggcaggagaatcgcttgaacctgagaggcagaggttgcagtgagccgaggtcacaccattgcactccagcctgggtgacagggcgagactctgtctcaaaaaaaaaaaaaaaaaaaaacccaactcttgcatgcaagccatcagggaggtcgggtcttaagcatgagctgccggattctccttatttggcaccctgcaaataaatgccctccctcctttctccctatgcaaacctcagtacagatgtttgacctcactgtgccaggcaagcagactccaatttggtcctttaacactattctctatttgacttatttatgttctaacctttattattatttctgctaactttgattttagtttgttctttttctagttcctttaggtgttacattaattgcttatttaagacctttcttctttttttcatataggcatttatcaccacaaactttcctcttagtatgttgtgttacgtttttttatgtgtcttgagatactgtaaaccaaaaataaaattctaagccccacaactgactgaatggatccctcctctcagccaaggggattccaaactaaacttgagaaactagttcaggccattatggaagagggttggacatgcctcattatgacctcctccctttggaattcaggcacaactcccagcattaacattaaaacagagatcttaagactgacaaaacagtctttgcagcaataaaactttgacaccaaattctaacctgaccctagtatagcatcacatgacagatagcaggccctgaaagaaattaaaatattttacttcaaaatatatttctttgccatattttgaaatggccctgcaatgctgtctcttgtggggaaatttctcattctgtaaagaatccccttccttttccaggtctttttctgatcctgaagaaattagctgagggtctagcaccttttaaaggtctgaataggaaacatttaccatctattgcctctacaggtagccacctatgagacttcatctacataataagaaccttggtctccaggacctcttttttttctttttttttttttttgagatggcgtctcactctgttacccaggctggaatgcagtggcttgatctcagctcactgctgcaacctccacctcctgggttcaagcaattctcctgtctcagcctcccaagtagctgggactacaggcacataccaccatgctgggctaatttttgtctttttagtagagatgggctttcacctaattggtcaggcttgtctcaaactcctgacctcaggtgatccacctcggcctcccaaagtgctgggattataggcgtgagccaccacgaccagccagtctccaggacctatcttaacctggagtctcctttctattgattccaggtctttggataataactctttcaaccaattgccaatcagaaaacattttaatccacctatgacctggaagtgccccattttgagttgtcctgcctttctagaccaaaccgatgtataccttacaagtactgattggtgtctgtctataaattctgtccccctaaaatgcataaaaccaagctgtaacctaaccaacttgggtacatgttctcagggcctcctggggctgtatcatgggtcatggtccccacatttggctcagaataaatttcttcaaatattttacagagtttgggtttttcatcagcaacatatttttaaatttttatttatttttagatggaatctctgtcacccaggctggagtgcagtggtgccatctcagctcactgcaaccccgcctcctgggttcaagtaattctcctgcctcagcctcctgagtaactgggactacaggcatgtgccaccatgctcagctaatttttgtatttttagtagagacagggtttcactatgttaatcaggctggtctcaaactcctgacctcaagtgatctgtttgcctcggcctcccaaagtgcagggattacaggcgtgagccactgcgcctggccttcaacaatatttttaaattcccttttgatttatttgacttggtgattattcaagggtatgttgcttaatctccatgtatttgtgacttttcccattttcttgctgttattgatttctagtttcatttcattgtggtcagaaaagatgcttgtaatgatttcaaccttcttaaatgtgttaagacttgttttgtgatctgacatgtgatctattctggaaagtgttccatgtatgcttgagaagaattgtattctgcagttaagtggagagctctgcgtgcgtctgttaggtactgatctatgatctatagtgttgttagagccagcttttttttttttttttttttttggaggcagagtttcaatcattgcccaggctggattgcagtggcggaatctcggctcactgcaacctccgcctcccgggtacaagtgattctcctgcctcagcctcctgagtagctgggattacaggcaagcgccaccacgcccagctaactttgtatttttagtagagacagggcttctccatgttggtaaggctggtctcgaactcccgacctcaggtgatccgcctgcttcggcctcccaaagtgctgggattacaggtgtgtgccaccgcgcacggcctgagccagctttttataggttttctgtatggatgccctatgcactaatgtatgtggggtattgaagtcccctcctattattgtattactgttaattactccctttagatctgtcaaaacttgtattatatattgaagtactctgatattgagcttatatatttataattattatatatgcctactgaattggccttttatcattatacgatgaccccttggctgtcactctgctcttccatttactgatatgcttgcactcacgtggttttatgctaccagctggtctcaagggttttggggcctgctcattgccattgcacaggcatctcctacctctgccccggccctctgaagagaggtactccaacattcctgtggtgctgggattcctccccagcacatgcctggctgctttggtaagtggtgaatcttctggggcctctgtggtgtgacctcacctggtgggtttaccagccttacacagcatcatccatctgagcatgcccatgtcactgaaacttctcatcccttctcccactgtctctggcaatgcaggcctttttaacttcacttagtttgggtaattccttttaccatgcttctaggtgccaatatagttacatggtttgtttagttttgttttttttgagacagagtcttgctctgtcgccaggctggagtgcagtggcgtgatcttggcttactgcaacctctgccttccaggttcaagcgattcttttgcctcagcctccaaagtagctgggactacaggtgtgcaccactaagcccagctaatttttgtatttttagtagagacagggtttcaccatgttggccaggatggtctcgatctcttgatctcgtgatccgcccgcctcagcctcccaaagtgctgggattacaggtgtgagccaccgcgcccagccaaagttacatgtttgtaccaacttctggagtccgtttcaggatgacaaatcttatatcccgggggagtgcttccaaattgaggaagttctcatcttccaaatttgtttctccctgcccttgactcaggccctcagatccagccccatgaggactctccccatccctgctggtccatggagactaggtcctgtagcttctttggagcaaaggatcatccctcccttttcagactagcacatacccagctgggacacactgtgacttaaccctcgttagtggcctactggccagattgtgaggtggaggaagagctgaggggggtgatgtggttttgcaggggagtggcctctgcactgcctacaagcgagagaagaatgcttcctaaatagggaggggggagccagttcggcagacttggaggatttgggaaaatctggtgattcaggatttgagggtgcatctagccccatccatgtttcatagtcctcattgttttccaaccagctcatgaccttggtgtggcaggcctgttcagatggggagttcctcttcttatcttttttatttttatttttatttttttttgagacagagttttgctctttttgcccaggctggagtacaatggcgtgatctcagcccattgcaacctccgcctccaggttcaagcgatactcctgcctcagcctcccatgtagctgggattacaggcatgcgccaccacgcccagctaatttttttgtatttttagtggagatggtgtttctccatgttggtcaggctggtctcgaactctccacctcaggtgatcctcccacctcggcctcccaaagtgcttggccaccgtgccccaccggagttccccctctttgggcgcagttactcgcaattaagacctgggcctgggcctgggcctcagctttctccatccttcagccactttacatgctcccaaggaaaccctgttactttctcatttagctttaaattgttgattaatcaggctctgcttagctgcagccactccagtcccactctcctgacaatgactgactcccccacattcatcatttgctggtacattcccttccacctctgcatctgccagcagtgacagtttgaacaatagtacctctgctctgtgcgggggcatgtacccgctccatctacccccagcaaaaggatccttatcagcagctaggcagtgggtgatccagagccagaatcccatcttagcatcttcttcctcagacccctcctgacccagcggtcacaggttgggctctccagaagcagtgtctgagagggaggttagtgtgcaggtttcttagggcgtgccctgtgatcgccacctgcagaagagaagagaacgaagcaggatcaggaagaggcagaaactggctgcattcagcgaaggcctcagccaaccccgtatgtttatccccatcctggacgtgtgttgctgaaggaaatgagagtgtggttgggtggaggcacgtttggagaggcctgacggctgaaggctgtctgccaacagcattcccagcagtgtggccaagaaatgtttcttttccaaaggggatctggatggtcaattgcagtgtcccctttagagggagtggaggaaaagtgagacccatgagaagctggaaaaaccagctgtcatcatcactctcatcattgttcctgttgttgcttttaacctgctccttctattgctaccggaagtgctgcaggggttttggtatctacatagggctcagtcggcaagagttcagaataagtagggccctctaggtcactcggcctcctccagcaaagatgttaatctggagaccgggaaagctggaagggtctggagactattctcatagttcacaaagctagctgcatactggaatcacctgggaacattttttctttttctttctttttttttttttttgatggagtctcactctgttgtccaggctggggtgcagtggcacaatctcggctcacttcaacctccgcctccccagttcaagcgattctcgtgtctcagcctcccgaggagctgggactacaggcgcctgccaccatgcccggctaattttttgtatttttactagagatggggtttcaccatgttggccaggctggtcttgaactcctgacctcaggtaatccacctgcctctgcctcccaaagtgctaggattacaggcgtgagccactgcgcttggccgggaatattttttaaactatgtctggctctaccctcataaaattatgaaatgattttaatggtctggagttgtagttgggatattcagttttatcttgttttttgaaactccccaagtacttataacgtacaggctgacaagaacacctgattcaatcagttctctctgccccgactttacagatgcagaaaccacgaccaagagagaagaagagatttgtccaagaacacatggtaggtagtgggaggagccaaaccagagtcctaaaccttgacccattttcccaccattcaacactgctcctcgggctgagcagggcctggtcctgcaatgagctacaaacagtccgtgggatgacaactgcacaactttcatattacatcagcacttagtctgtggaggtcgcagggaattctcggtataaggctaggctcaaggagttcctagtcaggaaaagctccccggcgtgggcttgagtaaaggccaggttggaattcaaaagttggaggacagtagaacttccattctgactggtgggccaggagagaaggggtctcagcaggggtgtatggagacgagtgtgacagatgcagggagagtggtgggccgcaggaaaagggaagccagactgggagggagaggccaggcagtgccatgaaaccccagccagcaaacccagggctatggatgtgtttgagacttggaccagagtcaatggggacttggaagctgcttgagcctgggaggcacctcgccagaggagagcttagaacatggcttctgggagcaggcatggtggtcaggtagaccgaaggctgaggcttagagcaaggaaaaggccacagagtcgcccttgtgttctgggagggtggggctaggagccgctccagcacttgtcagagctgccgccaacatttattatattagagccaggcatggtggtaagtgctgtagtcccagctactcaggaggctgaggcaggaggatcacttgagcccaggagttcaaggcttcagtgagctgcgatctgtgatcatgcctgtgagtagccactgcattccagcctggacgatatagatagcaagaccacatctctaaaaaacaaatatagagttctggccgggcgcagtggctcatgcctgtaatcccagcactttgggaggccgacgtgggcggatcacaatgtcaggagatcgagaccatcctggctaacaaggtgaaaccccatctctactaaaaacacaaaaaaattagccgggcgtggtggcgggcgcctgtagtcccagctactcgggaggctgaggcaggagaatggcgtgaacccgggtggcggagcttgcagtgagcagagatcgcgccactgcactccagcctgggcgacagagcgagactccatctcaaaaaatatatatatagagagagagagagagagaaagagagagagagaaagagagagagagagagagagaaagagagagagagagagttctgttctgctctgggctctgctcagccatgccgtgggacagccttgcctgcccctccccctgccagcaggaatccgtggcacaggcacaggctactaatgtgggtgttaacaagagtgagcagcaccaaacccctgctgggtgagggttggggacagcaggtgtgactgatacactgggcaatgatgcctcccctcctgtctctggcctctgggcctgatgggctccagcctaatcccagcacttcctttccggatgcttgaagggaaagccccacagctcttggtgtgctgcaggctcttagcccaaatgctcccctcctgaaccccccacggctcaacatggaacagggtctggctaaatactccaccagagtaagagacggagaaaaatcccgccaggcgagcagcacaaatgatgactggacagcaaatggcacagggagaacaaatcttagaatggatggatcgaagccaccaaataagtatgacaaaagacgaaagcagagcagggagctgaacgccctgccacacgggaaagtcactggcaagaacagcactgaatcgtcttccatctcccaaactcttgatgcttttccctctctgtgtgtgttttgtctgcacccatgtctgcacttccactcccctgagattcaaatgaagctggggaagaacaatgggaaacatttctgaataggggctgtcttggcctgtgttgctataaatgaacacctgagactggataatttataaagaaaaaaatgtcggccgggcgtggtggctcatgcctgtaatcccagcactttggaaggccaaggtgggtggatcacctaaagtcaggagttagagaacagcctgacaaacatggtgaaaccccgtctctactaaaaatacaaaaattagctgggggtggtgatgcctgcctgtagtccctgatacttggggggctgaggcaggagaattgcttgaactcaggaggtggaagctgcagtgagccaatattgcaccactacaccatgttggtcaggctggtctcaaactcctgatctcgtgatccacccgcctcggcttcccaaagtgctaggattacgggtgtgagccaccacacccggccttccttgcagattcttttggtacatagctccatatttctttctttctttttttttttgagacagagtcttgctctgtcgcccaggctagagtgcagtagtgcgatctcggctcactgcaagctccgcctcccgggttgatgccattctcctgcctcagccccccaagtatcagggattacaggcaggagtagatgggactacaggcgcccgccaccacacccagctaattttttgtatttttagtagagacggggtttcaccatgttggccaggatggtctcgatctcctgacctcgtgatccgcccgtcttggcctcccaaagtgctaggattacaggcgtgagccactgcgcccggtctcatagctccatatttcaaaataggatgctgtattttgctctttcctccatcccactccccgccacacatgtgcaaccttctctgccactccatcttcctcacagagtttggcgtgggttacctttctgagacccagcaaaggttgctgatctccttcttttatggacacttccttgggatgtgtcatagtccttggttttcttctcatatcgaagaatggaaacacagagctagttggaaggtttgaatatgtaaaggtttcagcatgcaaatttcacgttagcgtgttctgtcgaggcagtgtccttgaggacccagccataattaggcttacgtcacaggccgatgctaggacatggtgtaaagtgagtttcctgttatccccacagtggctgaggtcacacttagtaattatccatgtgggcagaatatttttgttgtttaagctatactctttttttttttttttgagacagagtttctctcttgttgcccaggctggagtgcaatggtgcaatctcggctcaccacaacctccacctcccaggttcaagcgattctcctgcctcagcctcctgagtagctgggattacaggcacgtaccaccacgcctggctaattttgtatttttagtagagacggggtttctccatgttgaggctggtcttgaactcctgacctcaggtgatccacctgcctcagcctcccaaagtgctgggattacaggcgtgagccaccacacctggccagtttaagctaactcttacagaagagtgctcagctcataggggatccctttatacaagagataagaaccaaacaaaaaggaatgaatgattcaaagtagaatttcagatgctgaaaaggcaatgaaaaagtaaagaagcacatgagttacagtagatggatctgcgttccagcctcaacagtggtatccagcagcacaaaaccctcttcctgtatgttacgggctgaattgtgtcccccgcctctcaattcatatattgacgtcctaatccccagcacctcagaatgtgactgtatttggaacaagggccattatatcggtgggccttaacccaatataactggtgtccttataagaaaaacattatccttccacccgcaggatccactgttggaaaaccagaatagtatcagaaatagtggcaggaaatagggacttgaatagaggaagggaggtgtttttattacttagtcctcccaccctcaatgaaaaaagagacaagtagggaagaattctgattgtcagtgaacatagcactcaagaaaatatattaggtctataaaatgatagtttaaaacctgatggtatggtttgaatgtgtccaacactcaaagttcatgtgttagaaacctgatccccaatgcagcaatgttgggaggcagggcctaatgggaggtgtttgggtcacgggggctccgccctcatgaatggattaatgccattcttagaggaaaagattcattactgtgggagcgggttccttataaaaggaccagttcagctccctcttgcactcactctctctctgtttctcactctttctttgcccttccactatgggacgacacagcaagtaggcccttgccagaacctggagccctccagaacggtgagctaataaatttcggtccattataagctataagacccttcactgatacctcaaaatgatgtatgggtgtgactaggagggcttttaagaatgttaaagaaatgatgtcactgaaaatggtggactagagaactccaaaacccatccctccactaaagcaacaattaaactggcaaaaaaaatgtcagaatttacttttcctgaattttgggataataaaaaacaaccactgagggtctggttaatgaagaaagaagcagctaaattttggtaagagatattgtggcatttcaatgtaacccccaatcacctctcaatccccagttcagaaagcagctatggagatggtggcccacattccttgggcagcttgcttgtgccagagaggccaataaggtccttgttctcaaaaagctgtggttgtatttttcgaccagtctggcagcaaccagagggactgactcagaggcttgcctttgtttcatcgccctcagaactttcagcattggaaccaccttcccagcagtgtttgtcgaaaggatttaaaggcatatgccagctgtagccacctggagcaagggaaaacagatggggccagaagcagacacaccagagcacctaggagggaagaggctggggaaagagaaacatggagaaataaagacttcgaaaagctcctgcatagctgggcgcagtggctcacgcctgtaatcccagcactttgggaggccgaagtgggcagatcacgaggtcaggagatcgagaccatcctggctaatgtggtgaaaccgcatctctactaaaaacacaaaaattagctgggtgtagtagtgcacgccagtagtcccagctactcgggaggctgacgcaggagaattacttgaacccgggaggcagagcttgcagtgagtggagatcgtgccactgcactccagcctggcaaaagagcaagactcagtctcaaaaaaaaaaaaaaaaaaaaaaaaaaaacaaagcaaaggtcaggcgcggtggctcacgcctgtaatcccagcactttgggaggccgaggtgggggatcacttgaggtcaggagtttgaaaccagcctggccaacctggcgaaactctgtctccactaaaaatacaaaaattagccaggcatggtggtgggcgcctcccagctactcgggaggctaaggcaccagaattgcttgaaccaggaggcagaggttgcagtgagctgagatcgtgccactgcactgtagcctgggtgacagagcgagactctttcaaaaaaaaaaaaaaagccaaaaagtagaacccaaatattcaccaactgatgaatggaaaataaaatgtggccaggcgtggtggctcacacctgtaatcccagcactttgggaggctgaggcggtggatcacctgaggtcaggagtttgtgaccagcctgaccaacatggtgaaaccctgtctctactaaaaatacaaaattagctgggcgtggtggcacatgcctgtaatcccagctacttggaaggctgaggcagaatcgcttgaacctgggaggcgaaggttgcagtgagccgagaggccatgtactgtatgattctatttacatggaatactcaaaacaggcaattccataaagatagaaagtagactagtggttgcctttggctgtagaaactggcagatgcgttggttaattttatttgtcaccctgactggggaacagagagcccagatatttggtcaaacattattccaggtgtgtctgtgagggtgtttttggatgagattagcatttaaatcagtagactgagtaaagccaactgcaaatgtgggtgggcctgattagaacaaaaaaccccaccctcccttgagtaacattgcttcttcctgggtcttgagcccactggccttcagatggaaattacaccagtggctctcctagctttcaggcctttggacttagactagaacaaaaccatcagttcttcctggtctccagcttgctgactgaccctggagatcttaggacttgcaagagccaattcaaatgcatatatgtgttattggtttcctttatctggataattctgactaattcatgggaattgggaggtgacggttaagatttctttttgggatgataaaaatattctgcaattgattttggtgatggctgcataactgtgactatattaaaagccactgaattttatggcatgtgagttctatctcaatataacgttagctatttttgtatggtatatgaatcacatctcatgataacatatagctacttttttttttaagaaaatctgcttttaaaggcatttgatactcacattgtatatactttattaaagacctagaggcagaggctctagaaggagcaggggtccccagccaccgggagattcccagctcccttctcgtgcttggattcgcgcactcaggctcatccctgcgggtgggcctcttggacgcagcaccctccggagacagcgccacgggtgtgggacttttcctcctttccaattggcaaagtgatcccgggcaagtcattgtccgtcatcccaggtatgcctctataaggtgtgggacagctcctggttccacagaggatcgagcatgggggcaggtggtggaccgaactggagaggaaggactctcgcgatggggcagcaagtaggacgggcggttccagacgagcacacggggtggggcgggccagcgtgacgccacaggcgccccattgtgacacacaggcagcctcagctgggattggccgggaggcgccggccagggataaagccagagttccagggcccccaccctggccagagtctgggcagagagagtctctgctgctcctgctgctgctcctgctgctcctgctgctgctcctgctgctcctgctgctcctgctgctcctgcccggcctcccctctaggtaacccggaaccctgactccggtgaggaggccacgctcacctgtcttgggtcccctaagtcccaggccttgtctgcatgtcagcccagggctggggctgcacccctgcctaggtctcccaggcccagcctctgactgcattccaggcttctcgcccttctaactctcctgcggcctccctgcctcgcgcccaggtctgtttgggtctaggtaaccagggttgggtggcggcctcgggaagccgatgtgctgtgggaagtgtggatgccgcgtagcggtgcctccatgggaagccgtgcctccagctcagggacagatgtcctcagtggggcccactgtccagctggacatctctagagcctccgggacaaatttagactgaaacccattgaacctttggaaacattcatcaaataaactgaattgggagcataggaacagaaataaatgaaggtcattccctgcagagaagaaccaaaaccacagagaatgaagaactaggttttagaataggagcatctaaaaatagtttgtacaggtgcagagaggctgcctttttgctcatgatgacaagaaacatcagaacctcaaaacagggcttagaggagccacctttccccacaaaaaaaggtgtggattgtacctctctttcctttaaagaaccccaggattggttaatggttctgtgggatatgggggcctaagtcctggcccagaatttattgaagtgtttgggggaacctgtaatcaatacgattttattcttaggaacattttcagcaggacacggtggctcagacttgtaatcccagcactttaggaggcggaggtgggtggattgcttgagcccagcagttcaagactagcttgagcaacatggcaaaaccccatctctacaaaaggaaaaaaaaggaacacttttcttcagaaaaggaagatgtcaatggactgaacagtagattaaacatgtttaaaaaaaaaaatctccaggccggcaaggagtcttatgcctgtaatcccagcactttgggaggccaaggcaggcggatcacctgaggtcaggagttctagaccagcctggctaacatggtgaaaccccatctctactaaaaatataaaaattagccgggcatggtggcaggtgcctgtaatcccagctattcggaaggctaaggcaggagaattgcttgaacctgtgaggcggaggttgcagtgagccaagatcgtgccattgcactccagccttggcaacacagtgagactccgtctcggaaaaaaaaaaaaatctctataaagatgcaagagtccttacaatattatcaaaatgtgaattgaagccaaaagcagaaaatctcttgtgggcagggagtggacagcaaaaggctttttaaaggaagatattccacacaaaaaagaatggagcctctttccctcagcggcccaaggtaatctgtgaaaaaggttcactattcacttgacctcgagaaccccacaaaatcacgcaaatcaagaggttccaatattcgtgttcactttaaggtatgcgattcatagttgtgatccaagagttcctcgtgttccactcaaaaaacacttgtgaaactgcccaggccatcaagagtgtgcatatacgaaaagccacgaagtctctgaaagatgtcactttacagaaacagtgcgtaccattctaatgttacagtaatgaagttggcaaacagtggggttggacacaaggtcggtggcccaaaaagagtgctaaatttttgctgcacatgctaaaaaatgcagagagtaatggtgaacttaagggtttagatgtagattctctggtcattgagcatatccaagtgaacaaagcaccgaagatatgccactggacctacagggcttatggtcggattaacccatacgtgagctctctctgccacactgagatgatccttactgaaaaggaacagattgttcctaaaccagaagaggaggttgcccagaagaaaaagatatcccagaagaaactgaagaaacaaaaacttatggcacgggagtaaattcagcattaaaataagtgcaattaaaaggaaaacaaaaagaatggaggaaaattaataaaggccattaaacaaggtaaagttgtgcaatgagaattcaaaaatagatttgtagcaaagattaaaataatgcatgtataatacagtgctaggaaaataacaggtcctcaggaaaaaatattagataaagtaacaaagatttgcatttccagaccactcagaattggtttgtgaatcattctgtagtgattcacatcagattcacaccaattctgtggccaatttacacattcataaagcatcacaagaagttcacacaatctggattctgagcatgcaatcagagtgattagattggactccatatggcctaatcagagaaagagtaaatttgagaggagaaatgagaaagggaaaaagaaaaccaacattacaacaaagtaattagaaaaaggggcccactcacaccatggtgtctttgggtttatgtgactccactgtaaatattaacagcaaacttagttgtcactcatgcttgcagagaagctagaagtaggttaaattatacatctcagtcctatagcacttgtcagctctgtaccccatgaagtcctaaattctgacatatctgttgctattgtttgaatgtgtcctccaaatttcatgtgttggaaactaaatccccaaattcatatgtttattggaggtgaagcctttaggaggtaattaggattagataacgtcatcacggcagagtcctattatgggactggtggctttataacaagaggaagaaagacctgagataacatgcacatttttgccctctcgccatgtgacgccctctgcgatgttatgacatagcaagaaggccttcaccagatgccgacaccatgctgttggacttctcagctcccaaaaccgtgagctaaataagcttattctttataaattacccagcctccccaggtattctgttatagcaacagaaaacaaaccaagatatctgtgaaagcctagatacactaggcacactaaatatcaggaatccaaaaattgctctctctggaatccatttccatacattacttcccttaatccttacaataaccctttgagataggttatactccacacattttagagttgaggaaactggcaaagaaaagttgggtgacccatccaaaatcacacagctagtaggtagcaaggacttgaggccctgtcctgacatctggccctttggcatagttgttacctctttcttggtagaatggatctccataccttagatcttccttatttgtattgctgaagacatttttacaattttatttatttatttatttatttatttatttagagatggagtctcattcttttgcccagactggagtgcagtggcacaatttctgctcactgcaacctccatctcctgggttcaagctattctcctccctcagcctctcgagtagctgggattacaggcacatgccactgtgccaagccaatttttgtatttttagtagagacagggtctcaccatgttggccaggctggtctcaaactcctgacctcaagtgatccacctgccttggcctcccaaagtgctgacattacaggtgtgagccaccccaccaggcccatgaagacattttaaacccataaaagtaaattctgattaacaattagaacaggtcagttgcggtggctcacacctgtaatcccaacactttgggaggccaaggcaggtggatcacttgaggtcaggagttcaagaccagcctggccaacatggcaaaaccccgtctctactaaaaatacaaaaattagctgggcgtggtggtgcatgcctgtaattccagcaactgggaaggctgaggcacgagaatggaggttgcagtgagccgagatcacaccactgcactccagcttgggtgacagagcgagactctatctcaaaaaacaaaacaaaacaaacaacaaaaatcccaattaggacaaagccctcttttacaattaatatcatatatcaggttggaagacagctgtggtggtccaaaaaagacagcctcatattcattaatgttgacagaattacagagctctgtctgccactgggcctctctctctgcacatagccctcactaataagccacactcatcatcagctgcattttgtgagcattgaggaagcatggcctttgggtttaataaagtaccgagtccagctctctaggctgaaaaacatctccaaagacaaggtcagccaaaattgtcatgggggcaaagataaatggaaaaagtcatatttattgtcaaatagggactggctggataggatcctcatcccttgctagttgcactcacaagctgttaccccaagagacatagcactttccacttccaacattccatttctccaatgcaacgggcatccaaatcactctagtgtcttcagaccattgaacatacatggcactcttctaatcagacagaccattgaaagactttaggccctgactgtttagccacatttacatgggtttgaactgaaccacatcttcggaaaaaccaaagcctaataggtcacagaagccttaaaagggggacaggcagagagaaaaaacaaggcaattgtttccacctgtaatctttttggattttcccattttaagagagggtttctttcctatttgagggccttgaggcacatcatatgaaatgaatgaaaacctggcatcaaacaaaatcatcatgaaaatctaaatgcccaacgttcacaaactccccgaatctgcatttttacccccaagtagcagctagactccactttgatcttcctccatctccataacatggcattcagactggggttttgttttgttttgttttgttttgaggcagagtctcactctgtcccaaggctggagtgcagtggcatgatctcggctcactgcaacctccacctcccaggttcaagcaattctcctgcctcagccttctgtgtagctgggactacaggcgcatgccaccatgcccagctaatttttctatttttagtagagacggggtttcaccatgttggccaggatggtctcaatctgttgacctcgtgatccgcctgcctcagcctcccaaagtgctggaattacaggtgtgagccaccgcagactggcctttttttgtcaggaggctgcagcctggtggaggctccctctgcctggggatctgcatgaagcccacactgactcccagtgaggatttctgatggaaactgaaggcatgccaccagttttaatgggatctttcgtcctgaagagtggcatagctagctggtgttgggacttagaagaaagattttctgtcacaatgggaaacaggagttcctttctttcctttgggctaaattccctgttagcggggagcaggggagctagagatcatccagagacttcgctcctaagaatctggagtcatctatcagttggggcactcatagttgggattggtgcttgaagtaggacatcagagatgggtaaaaaacaaagaggggaaaaatctgcaaatgtatgttgcatgctgtggcaaatcccagatgtggtcctcaggtcctcctccaagggagaacttgctgtccagccatacaagggcagttagtggacagcctgcagctggcctttgcctacctcagctttccagccaatgtcaccatcccacaggagtggccctggccggtgactgagcaaggtggtggtacagggcaagccatttccatgggacatgggattcccctaacagagctccccatggacaggcagagaatacaggcatctagagatagtttgtacacatgcatcctggcctgatggctgtccctgccaacccggccaactcccatttcctttcataagtgttactcccaaaatcactgtgtcagcagatacttcccaaaaagccagcctgcaagagcaagtctgtcccccaaacctttggtgtggtggtagagataacccactccacagggcagtgtgctttttcccttcagggttcagttttcaagttctggttggaatttgtcagatcaggaatgtgtaaatctgaaagataaatgacatcttccatgggctttggggagctggaacattttcagccccttagaaaacaggagccaaggctgtgcgcagtggcttacacctgtaatcccagcactttgggaggccgaggtgggcagatcacttcagtccaggaatttgagaccagcctgggcgacatggtaaaaccccgtctctactaaaaatataaaaattagctgggtgtggtggcacacacctgtagtcccagctacttgggaagctgaggcaggaggatcccttgagcccgggaggcagaggttgcagtgagccatgagcgtgccactgcactccagccctgcaacagagcaagaccctgtttcaaaaaaaaaaaaaaaaaaaaaaagtaaagactttgtcttgactaacaaatacacctgggccaggtatggtggcccatacctgcaattccagcactttgggaggccaagggggtaggattgcttgagcccaggagttcaagaccagcctggcatcatggcaagaccctgtttctacaaaaaaattaaaaaattagccaggcagacgggcatggtggctcacacctataatcccagcactttgggaggccgaggagggcagatcatgaggtcaggagtttgagaccagcctgaccatcatggtgaaaccctatctctactaaaaatacaaaaattagccgggcatggttgcgcgcacctgtaatcccagctactcgggaggtggagtttgcagtgagttgagatcccaccactgcactccagcctgggcgacagagtgagactctgtctcaaaaaaaaaaaaaaaaaattagctggggatggtggccatggtcccagctacttggaaagctgaggcaggaagatcccttggagcctaggatttcaaggcttcagggagccacgaaggtgctacttcactccagcctgagcaacatagtgagactctgtctcaaaaacaaacacaaaaacacccaccagtcacctaggtgtgagatgatactaaactaagcagagaccaggaaaccaagctgtgcgtgtttttctcagtgatgaggcagccccactcataatgtgcttgtggcgtaacccctgcgtccttccgcctcctccacaacagtcactctgagtcgtcactgtcatacctctttactccaggagccttgtatgttcatgcataggggccagctctcacgagggtcagcttcccggcctcatgccctggaaatctaggttgcatttgtacaacgggacagtcaagatgctctgaggcatcatgattataaacacaatttttatgaaaacaatcttgaaggcatatctttgcatttatccttgtttctttagtacatattctctagaaatagaaatgtctagacaaaagcatctaaaaaacatttgtcatattataatccaaaaagcaagttccaatttatacgtgcttttcccatcttgcatgacaatatttatttccacatattcttgccaatgttggtaattatcctagtttgtatttgtcaattttctatattctacagaagttttttgttgttgttgttaaataaggtttagctgggcgtggtgactcatgcctgtaatcccagcactttgggaggccaaggcaggcggatcacaaggtcaggagatccagaccacggtgaaaccccgtctctactaaaaatataaaaaattagccaggctcggtggtgggcacctgtagtcccagctacttgggaggctgaggcaggagaatggcatgaacccgggaggcagagcttgcagtgagccgagatcacgccactgcactccagcctgggcgacagagcgagactccgtctcaaaaaaataaaaaaaataaaaaaataaggtttagtgtttgcatatacaaactctaaaataaggaagcaattctttacaatttctgggcaacagcagagctgggaggagggtgaggcgctatgtaactctctcaggtgcataattcaaagagctgtcaaaacactcagcaatcaagacatttaaaatatttaatatttccaaaagtaaaaattagtgcaaaaatctctgatgaacaaagtatcaaaattttacataagatgggtttccaccctgcacaactgcatgcttgcctcactcctagtccttgccctggtaagtagcgtcctagtctttattatttatttatttatttgtttgctttatagagacagggtttcacatgttggccaggctggtcttgaactcctgacctaaagcgacctgcctgcctcagcctcccaaagtgctgggattataggtgtgagccaccatgcccagccagagtcctagtctttaaagggaccctttagccacatctgcataagtcacttgatctaatctcttcatttgatcacaacgctatactgtagtttaatgtcttacctctgtcatagaacacaagacagtgcttggttccatatcctaggaaaatagggggccaggacatcacaggtgcagccacagatctgagcaggtgtccaaacacagtggaggctgggtgcagtggctcatgcctgtaatcccagcactttgggaggctgaggcaggaggattacttgaggccaagagttcacgaccagcctgggcgaaatagtgagactctgtctctacaaaaaagttaaaacttaacttttaattaatgatgggtgtggtgctgtgcacctgtaatcctagctactcaggaggctgaggtggaagaatcacttgagcctaggcgttcaaactgcagtgagctgtgatcacatcactgtactccagcctgagcaacaaagaccctgattcaaaaataaatacaaaatttaaaaaaaaaagttttatttttagacagggtctcgttcccaaactgctgggattataggcgtgagccacctggcctggccagatctttcttttcctttttttctttcttttcttttctttcttcttcttcttcttttttttttttttttttttgagatggagttccgctcatgttgcccatgctggagtgcaatggcgcaatctcagctcactgcaatctccgcctcccggattcaagcgattctcccgcctcagcctcctgagtagctgggattacaggcaccgccacaacgccaggctaatttttttgtatttttagtagagatggggtttcactatgttggccaggctggtcttcaacttctgacctcaggtgatccacccgcctaggcctcccaaagtgctgggattacaggtgtgagccaccgcaccagccagatcttttcttttctaaaaggcataaagccctgtgggtgttgtgaaggggtgggttgcccctccacacctgcgggtgtttctcattaggtggaacgagagacttggaaaagaaaaagacacagagacaaagtatagagaaagaaataagggggcccaggggaccagcgttcagcatatggaggatcccgccagcctctgagttcccttagtatttattgatcattcttgagtgcttcttcgagagggggatgtgtcagggtcacaagacataggggggagagggtcagcagacaaacacatgaacaaaggtctttgcatcatagacaaggtaaagaatcaagtgctgtgcttttagatatgcatacacataaacatctcaatgctttacaaagcattattgctgcccacatgtcccacctccagccctaaggcggtttttccctatcgcagtagatgtaacgtacaatcgggttttataccgagacattccattgcccagggacgggcaggagacagatgccttcctcttgtctcaactgcaagaggcatgccttcctcttatactaaacctcagcacagaccctttacgggtgtcgggctgggggacggtcaggtctttcccttcccacgaggccatatttcagactatcacatggggagaaaccttggacaatacctggctttcctaggcagaggtccctgcggccttctgcagtgtttgtgtccctgggtacttgagattagggagtggtgatgactcttaaggagcgtgctgccttcaagcatctgtttaacaaagcacatcttgcaccgcccttaatccatttaaccctgagtttgacacagcatatgttccagagagcacggggttgggggtaaggtcatagattaacagaatctcaaggcagaagaatttttcttagtacagaacaaaatggagtctcctatgtctacttctttctacacagacacagtaacaatctgatctctcttgcttttccccacagtgttgtatttattgaattaagattgatgcttcatgttcttcaacagaccaggagagtttatctttcttatttaataaggttttttgttttgttttgagacggggtctcgctctgtcccagactggaatgtagtggtgcaatcatggctcactgcaacctcgacctcctggattcaagcaatcctccctcctggtccctccaatgtgctggaactacagacatgagccaccacgctcggcctatttactagcctttttactgaaaaatttattcactcacttattggccaggcgcagtacctcacacctgtaatcccagcactttgggaggcccaggcaggaggatcacttgagcctaggaattccagaccacctggccaacatggtgaaatcccttctctactgaaaatacaaaaattagccatggatggtggcacacacctgtaatcccagctaagtgggggcctgaggcaagaggatcgcttgagcctgggaggcagatgttgcaatgaggccagatcacaccactgcactccatcctgggtgacagagcaagactccatccaaaaaaaaaaaaaagcattcactcactgttttatttttcttatttaataggaagaagaaagtactgttcaaatcagggacttgactcccacaagactcccacaagagcccggagtcttaagtggacaatgagccgtttaaaaccatgcacaggccagtcgcggtggcttagcccgtaatcccagcactctgggaggccaaggagggcaggtcacttgaggtcagaagttcgagaccagcctggccagcatggtgaaaccccatttctagtaaaaatacaaaaattagccggatgtagtggtacgcatttgtaatcccagctacttgggaggctaaggcaggagaatcgcttgaaaccgggaagcggaggttgcagtgagccgagatcgcgccactgcactccagcctgggcaacacagcaagaccctgtctaaaaaaaaaaaaaaagccaggctaagtgtctcaagcctgtaattccagcactttgggaggcctaggcgggcggatcacctgaggtcagtagttcaatatcagcctggccaacatggagaaaccctgtctctactaaaaatgcaaaaaaaattagccaggcgtggtggcgggcgtcagtaatcccagctactcgggaggctagggaggctgaggcaggagaatcgcttgagcccgggaggcggaggttgcagtgagccgagattgcgccactgcactccagcctgggcaacagagcgagactctgtctcaaaaattaaaagaaatgtggcattttccaagtctttttggcaaggtgcttcctggccgtgggcgtcgccctccgcacccccgcgcttgtcccctgagaggagaggagaaaggagcagccccgagccccgagccccgcgcccccgcgtcccccgcgccgccatccgctctcggccgccacgccgggttcctgccgcctcccgacgacaacgtcgccgcttcacaggaggcagggcacccggcgagcggcgaccgcgaacgcctctgacggccgcccagccgcccccagccaggccccgtcgtccccagccccgcccggagtcaacccacctccctcctcggcgttccctcctccacccgcgtccccacccccgccccgacgtcccctcgctccctctcagagtcccttctaccccggggtccccctgccctctgggcttcctctagtccctcgttcctcccctggacatctcctcacccctaacccccggcgtcctcaccgctcctcggagtcacccacccccgcgtcccctagtccgccccggcgtccccttctcccctgcgtccccttctcccctgcgtcccctcgctccctcccagaatccccatggcccagggatccccccgatcctgggcctcctcctgggcatctccttaatcccaccccccggtgccagtccccgcaccccggcgtcccctcgccgggtcactacgcgacgcggaggaggcggagcccgagtctcggccgccgggtggctgctccgctgcggcgccgcagttcaggctgggatgctccagcgcgtctgtgttcccgcaccggagaaaccacactcgctagcgctctgaattggtgctggaattcaggaaagagggcgtctttcctccttagcctcccagccctagaaccatactgcagaaacgaggtctttagcgatgcggagtcaccactttggtgtgacctcgtggcgcaatggtagcgcgtctgactccagatcagaaggttgcgtgttcaagtcacgtcggggtcaaggttgggtttttttttttttctttcttaattgtagaggattggaaagagcggaataaaagtcataaatgagaaattaagccccctgcaagatatgttgtccttccaacgcaacggaaagcaacttctttttcctttccctgggaataaaaacgccgttccgttccgagggaggggcagcaccaaccctccgagcgaaccgcgagggagccggaagccacccagccgtgtcgcagggagggcgccccgcccgccactcccacgcccacttctgcccgccccccactcacctgggctctcacctggaaggggtccctcgcttcccggaagtgggttccccaccctaaggactggtgtcttttgcatctccgtcttctccctgcctgccttgaacttctctttttttgtctgccgcactttcagggattcctagtctcagtgatgatctctctggtggtcctttctctgacacctgaattgacacctcattctcagcaggtctatgattcggccacagccgtaaggcctggatattcacttcaatgttgtctaacagttgttaccatgtatgatatctggttggcgggttcataggatctaatgttacgaaacatgatgttcaggtctgaattctctccacctgcgtggtccaaaagccccaggccaagaaattatagtttcccaggttaggataccccacagatgctggcagaagttgaggtaaattctctctgagagaaatacatcctcacaacaggccttttagttttcccacatataaagtcccagtcgaaatttactcataatacattttaaaggaaaataaagtctgtgaagctgattctgctgtccactgtttttgcaaaaacagcagaatcagatccacagattccagtatggagattatcagatattgaatacccaatggatatgtttaatctttttcaaaaaataaaagaggagaccaaaaagttaactagagaacgataaacaataaaaatatatgtgtaaataactaaaaacaaaattctagcaatggaagatttaatacttgaagttagaaacacaatggatatatttaacagcagattagactgagttgaaaaaagaataaaatggaatattgtggtgattcaaaatatgtggtcagtcatgactaaatatacaaattgaaaactgctcaaccgtattataaaaatagagggtcaggcatggtagctcatgcctgtaatcccagcactttgggaggcccaggagggaggatctcttgagcccaagagttcaagaccagactgaacaacatggtgagaccccatctcggaagtagtggtgcactgctgtggtcccagctactcaggaggctgtggcaggaggatcacttgagcccaggagctcaggaggctgcagtgagccatgatcacaccactgcactccagcctgggcaatagagtgagaccctgtctcaaaaacaaaacaaaacaaaaagtaggctggacggatcacctgtggtcaggagttcgagaccagcctgaccaacatggagaaaccccatctctactaaaaatacaaaattagccaggcgtggtggcacatgcctttaatcccagctactcaggaggctggggcagaagaatcgcttgaacccaggaagcagatgttgcggtgagccaagatcatgccattgcactccagcctgggaaacaagagcgaaactctgtctcaaaaaaaaaaaaaaaaaaaagtcaaggaattatgttttggtataaaattctttgatttcttttagggcctgctgtctgtcacgttagtatcttattgctacgaaaagtcagtcttaaggtctctgtttctttctttttcttttctttttttttttttttttttttttttttttttttgagacagagtttccctcttgttgcccaggctgcaggatctctgcaaccttcgcctcctgggttcaagcgactctcctgcctcagcctcccaagtagttgggattacaggcttggtgcaccactacacctggctaattttgtacttttagtagagatgaggtttcactattttggtcaggctggtctcgaattcctgacctcagatgatccactcgcctcctaaagtgctgggattacaggcatgagccactacgccaggccaaggtctctatttaaaattggtgctggtcaactgtgcctgaattccaaagggaggaaggtataaggaaacacgaccacccattcccaccacggcctgaactcgtatttcaggtttactttagaattgcgcttggccgagaggaggggtccgttccgttgtttggggggcctaggaattttttttttttttttttttttttgagacggagtctcgctcagtggcccaggctgggatgcaagcgatctcagctcactgcaagctccgcctcccgggttcacgccatttttctgcctcagcctccctagtagctgggactacaggcgcccgccaccacgcctggctaattttctgtatttttagtagagacggggtttcaccgtgttagccagggtagtctcaatctcctcacctcgtgatccacccgcctcggcctcccaaagtgctaggattacagcgtgaaccaccgcgcccggcctggggaacctaggatttttagtttacaccacatactggcatccttggctccagaggggaggaatgagcttgggcttcagaactgagaatgttcctatcagaatctgttccttcaatgggctaaagcctgagcacatgtcaccaaagctggagagctaagcggcacaagccgagatctggaacccaccttctgttcctcccacgcgccatctgaacttgatactcaacatgagaaattcctcagcgtcagccccactcccacctcagaggaggggcagcctccctcagcggggacttcagccccggggacactgcctggccaggcctgggtgaagagtcctcacgacctcattccctggagctgcctgtgggagagagaactctagaagctgagtgtcagaaagaaaccgggtgatctcagcctagttcgtgctccagaggatacacaaaactgacagtggctgggaatagaggcaaaaagtgttcagagcggactacagaactggaaggtcccatttgcataaaacagacagaatgccagggacccacagactcccactcacacaggactagaaaggaacacgccaaaacgttagtgataatgatctctgggtgacaagataacagattttttaaacaatctttttgcctgtgttttattattttgaagcaacaaacaataaagaatagtagtaaatgttccagcctacagtgagaggacctggccagaaatcctgactcctgccctgattagttgtgtggcctgggacagtttatttaacctctcagtccccaacttcttcatcagtaaaatgggaataataattgtccccaccttacagggcaaataagagaattcggtgaatggattagagttcatactgcatgagtgaacacagagagcttcaaacagtgcctggcacatggcaaacaccatagacgctggcgttgtgttcaccattactctgtaaaccaaaaataaaattctgaccaggtgtggtggctcacagctgtaattccaacactttgggataccaaggcaggaagatcgctggagcccaggagtttgagaccagtctgggcaacatagaaagacctcatctctacaaataataatttaaaaaattagccaggtgtggtggcatgcacctgtagtcccagctatactcaggaggctgaggtgggaggactgcttgagcccaggaggtgaaggctgcagtaagccatgatcatactgctatactccagcctgggtgacagagcgaggccttgtctcaaaataaaataaatacaaaatagtaaaataaaaatgtctaagctctccagctgactggcagacacgccccattccctacctctgccccctcctcagccaaagacattccaaacctgaaaatctagttcaagccatgatgggaagaggagtctacatgcctcatgatacccttctccctttggaattcaggtacaagggaccaatattaatgttaaaataaagatctggcagggcgcagtggctcatgcctgtaatcccagcactttgggaggccaaggcaggtggatcacctgaggtcaggagtttgaaaccagcctggccaacatggtgaaaccccgtctctactaaaaatacaaaaattagccaggcatggtggccggcacctgtgatcccagctacttgggaggctgaggcaggagagttgcttgaacctaggaggcagaggttgcaatgagccaagatcaggccactgcactccagcctgggcaacaagagcaaaactccgtctcaaaataaataaataaataaaaataaataataataaaaaaaataagataaagatcttaagactgacaaaacaatgtctttataggtaccaaattccaatctgactctagtatagcatcacatgacagatagcaggccccgaaagaaatcaatgtattttattccagaatatatatatatatatatatatattttttttttttttttttttttttttttgagacagagtttcactcttatcacccaggctggagtgtaatggtgtgatctcagctcactgcaacctctgcatcccgggttcaagcaattctcctgcctcagcctcctgagtagctaggattacaggtgcgtgccatcatgcctggctaatttttgtatctttagtagagatggagtttcaccatattggccaggctggtcttgaactcctgacctcaagtgatccacccgcataggcctcccaaactgctgggattacaggtgtgaggcaccatgcccagccccagaatatatattttttgacatattttgaaatggccctgcaaagctgtctcttgtagaggaaatttgtatcctgtagagaatccccctccctttccaggtctttttcctggtccaggagagattaagagtctggtaccttttcaggcctgataagagctctaaagcccgcttcctggaggcttcctctgcatgaacagaaacttgatctccacaacccccatttccagacactcctttctattgatgccaggtttttagatcataacttaactctttcaaccaattgccaatcagaaaatcttggaatccacctatgacctggaagcctcaatccacctccatcactcccagctctcactcccctctttgagttatcctgtctttccatacagaaccaatgtacaccttaaatatatagattgatgtctgcaagttctctccccctaaaatgtataaaatcacactgtgacccaaccaccttgggcacatattctcaggacctcatggggctgtgtcacaagttgtgatcctcatatttggttcagaataaatctcttccaatattctccagaatatggctctttttgacagtagctcttctagaattattaatatttccaaggctaagaaactcatcactagatcagtcagcaaaagaagattgtgtaagttcagaacttagaccaagagtgtgttccactgtcacccagctccaagacagggacccgttgattctgtgacctgcatgctgcgatggatcattcaaatgcacaacaggctcctgaggccatcacaggccgcctggctcttgtcaggccctcctggtggggagattttgaccacagttagcaaaggatagagcaaaggacagtttcgctgtctaaaaagcaaaatctcagaacaccggcagagggcgcaaacggcaagcccaggaatcacagggacgtcactgcgaacatctttttcctccaacatagaactaattaactttgtgcttgggtattctctaaaataatttctggaaaaccatgtaacccttgtacattttctaagtgggcataaaacattttcaccataattaaaaatagttgcgagggctggcatatcgcaaatagtaacatttaaaaataaaacgattacatcattgttttaaatatatccaatgacatatacacaacacaatttgatactgtcacccattttttaaaaatacatgaacaagttcttccttaacagtcagaatcattcatctttcctttttctcttcatatttccgttccttcccccatcaatttgtaatatacttttatgctgaaagtcttttatttaccactctaccatgactcttgccacaaaaatacaaatgtaaattgaaaattaaaatgtctcatttcctgagaccttcaaaggctaagtattaacaatttttctttgggatagaattatcactattttaaaaaatattttttggctccctcaaatcatgggaactataattaatatcaacacagcattgctacaaacaacacaaatatattacacatcttgataatgtattatgaggttttgaagttgtcagactgcctctttggcacctgacaagtgtttccaccttggagcaatgtgaggtacaatgtaggtgagaaggtgtctttctttagtgacaaatacactgagaagagaaaggagaaggcagttttaaccagaaacttgggaatctggaacagtagttgctttttttttttctttgagatggagtctcactctgtcgcccaggctggagtgcaatggcatggtggcatgatctcggctcactgcagcctctgcctgctgggttcaagcaattcttctgccccagcctctcgagtagctggaattacaggcacctgccatcgtgcgcagataatttttgtatttttgtagagacagggtttcaccatgttggccaggctggtcttgaactcctgacctcaggtgatccacctgcctctgcctcccaaagtgctgggattacagtcatgagccttaaaactttccttgtcacacacagtattcccttgtcacatacagtattgactactccagtttgaagatgcggtcaaaacctgctatggagagactgggaaagctgaccgagccagtggcccactggagggaccacagcagagcagacggagcaataacattccagatgctgggggaggagcacaccccaaggtctttgcatggccccggagtgctgggccagatgtcactcagccaagtcaacccaaaggaagcctggagaccgagtcacaggtagaatctgtgcaaagggaggagtagacattttaaaaaagaaaaagaaaaacgcaattttcccaaatagctttgttactttttgacaaggaataacagaacacccgtgagtaggtagtttttctgtttaaaaaaaaaaattttttttgagacatagttgcgctctctcacccaggctggaatgcagtggcaccatcttggctcactgcaacctctgcctctcaggttcaagcgactctcctgccttaacctcccgaggagctaggattacaggcgcccaccgccacgctaatttttgtattttttagtagagacggagttttgccatgttgcccaggctagtctcaaattcctgacctcaggagatctgcctggctcggcctctcaaagtgctgggcttgagccaccactcccggcctgttttaaatgttttaacttgggttaaagtgtttctattttaagtgttacatatgtctatagtctatttaattgccttactttgcaataagacactgaaataatttatagctctttaaactccacttttaggggctggatacagtggctcacgcctataatcccaatgccttaggaaggccaaggtggagggatcgcttgaggcctggagttcaagcctagcctggccaacatggcaagactgctacccccaactattattattctgagacaggatatctctctgttaccgaggatggaatgcagtggtgccgtcagagctcactgggaccttgaactcctgggctcaaggaatcctgatgcctcagcctcctgtctgtctggggctaccagcatgtccacacctgactaatttttgtatttttttgtagcaatggggtctcactatgttggccaggctggtacggactactggcttcaagtgatcctccagcctcagcctcccaaaggggtgagattatgggtgtgagccaccccacctggcctagttattttttaattaaaattattatttaaataatatttatttttattagtggctccggagtgcaatcccagaaactcagaaggctgaggagggaggattgcttgaacccaggagttcaagaccagtctatcaacataatgagacccagtctctaccaaaaataaataaataaataattagtcgggagtctaagttccagctacttgggagactgagacgggaggatcgcttgaacccaagagatcgagtctacagtgagtgatgatcgcaccactgcaccccagcctgggtgatagagtgagatcctgaaccaaaaaaaaaaaaaaaaaaaaaaatagagatagtttgtacttgaatgcaacttaagtcccctacttgttgaagaccgcccatgattgtctggtcttagacattttgaaatgggatgaaatgtatgtgccttagcagaaagaacaagctttaaagttagacatatttacatttaaatcctggtttgaccagttgcttttacataagccttagttttctcacctatgaagaaataagaataagagataataatgcccattgtgattttttttttctttttggtgagaatcaaatgagaatgtgttatagggcctggcagttaggtgttcaaaactgggggttattcttgtggtgatgctgaacagggctgtctttatacttccattgctctgagggccaggacttctggggccagctcttgccctaaattcctgtgtgaccttgggcaagtcccattttcctctgaggcccagtgaccccatgtgtccaatgcaagctggagaggcctccagctttgacactctcgtgataactctctacagccttgctgcttagaaggtgggcctcagacccgcagcagaggaggcctgggagtagctgcagactctcagaccccacccagacctaccccagactctgaatcagcacctgaacaaggtttccaggtgattctcatgcacgttgcggccgaaaagattctgcccaactgttccgaattaaactgatttgaagtaccttagttgacgaaccaaaccaccagaatgattgggaatttagacattttgttgactctaggaattaggcatatcctgacagtttagagacattacttttcatttctgactcctcacatctgaaaatatggaatttattcattctgaatgttttatttctggggacagcaggtgctcccagtgcatttgctgaatgagtgatgagctgtgtatggagttggatattcctgtcttttgattatctgttgttaaatgatgaccttttgttcccactctgtttctggaatcaggcagaagtaatttccagtcccctatctgccactgattagccattcagctccaggcaagttacttaaaccatttgaactgcaattcacccatctgaagaaagcaagtaataaccccctctaggatccttgtcaggattatgaggtaatggctgaaaacactcagcccagccctagaatatggcagctgttaatgatattacaagaaggaaatgtcattacatcaaatagtaggtaatggacaatggtattacattattatagttgtcattgttattaatatcttggggacagattcaaatggagctataggacaaaaagtgcttctgggcattctccctcagtgatcagatgacacccaggttcctggaagatggttccctccaaggtctttgatattacttctggtctggtgtcacacttggtccacagtggcccctcacaggcatgaccaagcaaacactcttctccaaagatggcttacaatctgagagtccttgtacttcttacaaacatagtccctcagatgactccaagtggcctttgtagttgcacagagctttctggactggaaagatggcggacaggatgttctcctactttttattttattgattgattgattgattgattgagatggagtttcgctcttgttgcccaggctagagtgcaatggtgtgatctcggctcaccgcaacctcctcctcccgggttcaagtgattatcctgcctcagcctcccgagtagctgggattacaggcatgtgccactatgcccagctaattttgtatttttagtagagatggggtttcttcatgttggtcaggctggtctcgaactccctactgtctcatgcatccatgtgacgagaccaccaaacaggctttgtgtgagcaacaagactgtttacttcacctgggtgcaggagggctgagtccgaaaagagagtcagcaaagggcggtgggattatcattagttcttataagttttgggataggcggtagagttaggagcaatgtttcgtgggcaggaggtggatctcacaaagtacattctcaagggtggggagaattataaagaagcttcttaagagtgggggagattacaaagtacattgatcagttagggtggggcagaaacaaatcacaatggtggaatgtcatcagttaaggctattttcacttcttttgtggctcttcagttgcttcaggccatctggatgtatacacgcagggcacaggggttatgatggcttagcttaggctcagaggcctgacacctacgtcaggtgatctgccacctcggcctcccaaagtgctgggattacaggctgagccaccatgcttggcccttatttatttatttattgagacagggtctcactctgttgcccaggctggattgcagtggcacaatcatggcttgttgctgccttgacctcccgagctcaagcaatcctcctacctcagcctcctgagtagctgggactagaggctcatgacaccatgcctggctaattcttaaatttttttgtagagatgaggtcttactatgttgcccaggctggtctccaactccagggctcagcctcccatcccatgatgctgcctgtttcttgagtccaggggtcatgtttgatggggaacagaatgacttcagctaagtcatctctgtcaagacctggagtattttattttaacctccaaaatccaacactagtcccattctgacctgcactcaagagcagtgctgagtcaactgagctcctggccagtctgggggcttgagctccatcctggttgagcacgaccaagcccttagagttatcagacacccttggctatctctggtctgcacatcctgagcccagattgcagcagcaattggcctaggcattaaccttgggcactgcctggagattgttgggctgagtcataaaagatgttgtgggggaaataaagagaaatcagactgttattgtatctattagaaaaaggaagacataagaaactctattttgatctgtactaagaaaaattcttctgctttgagatgctgttaatctgtagacctagccccagccctgtgctggcagataacatgtgctgtattgactcaaggtttaagggatttagggctgtgcaggatgtgctttggtaaaaatgtgtttgcaggcagtatgcttggtaaaagtcatcaccattctccagtctcgagtacacagtgcactgcggaaggccgcagggacctctgcccaagaaaccctgggtgttgtccaggtttccccccactgagacagcctgagatatggcctcgtgggaagggaaagacctgaccgtcccccagcccgacacccgtaaagggtctgtgctgaggaggattagtgaaagaggaaggcctctatgcggttgagataagaggaaggcctctatgcggttgagataagaggaaggcatctgtctactgctcgtccctgggaatggaacgtcttggtgtaaaacctgatcgtacattctatttactgagataggagaaaactgccttacggctggaggtgagacatgctggcggcaatactgttctttactgcactgagatgtgtaaagtcaaacataaatctggcgtatgtgcacatccaggcacagcacctttccttaaacttatttttgacacagagtcctttgctcacatgttttcctgctgaccctctccccacaattaccctatagtcttgccacatccccctcgccgagatggtagagatagtgatcaataaatactgagggaattcaaaaaccagtactggtgcaggtcctcacttgctgagcgctggtcccctgggcccacttttcttcctctatattttgtctctgtgtcttatttcttttcccactctcttgtctccaccttgcgagaagtacccaggggtgtggaggggcaggcccccttaaaatgtggccacatgttttgaacaaaaagtcataaaaaagatgtggccacatgttttgcccatttgggcttaaaatctcagggtcttacatctgcatatgactaggtgtgagctgggtggggcggaggggcgtcctctgtcggggtgtacatgggggcaccttgtagggcagtgcttcaagcccagagatgtatcaagagatttctttgacatcttggacaaggatatggacttctgctgagcatacatgtcagacgctcactcttggttgcctgctttacacccattctgctcctattctgtgctcacagaaccacaatgatttttcttttcaaagaaccagcttttggttttgttggtttttctctattgatttcctatttccaattctattggcttctgctctaatttctttttttcttttcttttgtttgctttggatttaatttgctcttctttttcttgtttcctatggtagaagcttagatgattgattttagatctttctcttttctcatagatgcagtcaatgctagaaatatccccctaagcactattttttaattctgcatcccacaaattctgatagtttgtattttcattttcataagatttaaattcatgaccaacatgttttaaaacttttcttgggatttcttctttggcccatgtgttactcaaaagcgtgttgttggccggcgcagtggctcacacctgtaatcccagcactttgggaggctgaggcgggtggatttcctgaggtcaggagttcaagaccagtctgaccaacacggtgaaaccccgtttctactaaatacaaaaacttagctgagtatggtgacgcattcctgtaatcccagctacttgagaggctgaggcaggagaatcgcttgaaaccggaaggcgaaggttgcagtgagccgagattgcgccattgcactccaccctgggcaacaagagtgaaactgtctcaaaaaagaaatgtgttgtttaatctccagatattttgggctttttccagctagctttctgttattgatttctagtttaattttattgtgtcctgacaacatactttgtgtggtttctttttctttttcttttctttcttttatttattttttttgagacatagtttcgctggagtacaatggcgcgaccttggcttgctgcaacctctgcctccctggttcaagcgattctcctgcctcagcctcctgagtagctgggattataggcatgcaccaccacacccggctaaattttgtatttttagtagagacagggtttctccgtgttggtcaggctggtctcgaactcccaatctcaggtgatccatccacttgggcctcccaaagtgctgggattacaggcatgagccatcgtgcccggcccaaaatgttcttctgaagccctgtgcactttacctcacttcctttaacttttttttttttctttgagacagagtttcgctcttgttgcccaggctggagtgcaatggcttgaccttggctcaccgcaacctccgcctcccaggttcaagtgattctcctgcttcagcctcccgagtagctgggactacagacatgagcaactatgcccagctaattttgtatttttagtagagacagtgtttctccatgttggtcaggctggtctcgaactcccaacctcaggtgatccacccgcctgggcctcccaaagtgctgggattataggtgtgagccaccatgcctggtctgtgtggtttctattcttttgaatttgttaaggtgtgttttatggcccagaaaatggcctatctcatggatgttccatgctaccttgagaagaatgtatattctgccgttgctggatgaagcagcctacaaatacttatatatctgcttgactggtggtgctactgagttactgagtttctgctcgctagatctgttcatttttgatagaggggtgttgaaatcttcaaccaataatagtggattcatgtatttctccttgtagttctatcagtttttgcttcacacattaaggattgctatggggccaggtgaagcactttgggaggccgaggtgggcagattgcatgagtccaggagtttgagaccagccttggcaacatggcaaaaccctgtctctgcaaaaaaatacaaaaattagccaagcatggtggcatgtgcctatagtcccagctactcgggaggctaaggtgagaggaccacttgaggaggttgcagtgagccgagatcacactactgcactccagcctgggtgacacaaagagagcaagaccctgtctcaaaaaaaaaaaaaaaattgctatgcattaacccctttaccattgtgtaatacccttataaagatatccctttctttgctctgaaatctgttctgtctaaagtcagtatagctaacccttgctttctgttgataagcgttagcataatatatctttctgcatccctttgcctttaatctagatgtctttatatttaaaatagctttattttattattattattattattattttaatagagatgggatcttgctacgttgcccaggctggttttgaactccgaggcttaagcaatcctcccacctcagctcccaaattgctgggattacaggcgtgggccaccttgcctagcctgtgtttctttttcttttttaaaaactttttcttagtggttccccaaaagtttgcaatatacatttacaattaattcaagtccacttccaaataacaatgtgtcacttcacaggtaatacaagtgctttataataacaaaataatcctaattcctccctctcattcctttctatggttgctgtcattcatttcacttatgcatacttaagcatatctaagtttcaagggattgatcctgatttgcctaaaccaatcaccactgccccttgtctaacccaccaccacaagcctcttttggagatattacggggaagggtgttgggtttcccactacaggtaagctggggttcggttcgaccattttaattttgattttagatgatagggtgaccttagcaggttgggcaacttggggacatccaatccgggttgttagaatttctcgtacatgtgtattggaattatcttgattttgccacttttcattgtttatgtgttccccgagaggcaaccacgtgtttaggaatgtttgccacatggttatcaagtttcaaagaggaggaatcatataagatttaaattcatgaccaggctcagtggttcatgcctgtaatcccggcactttgagaggccaagacgggaggattgcttcagcgcaggagttaagaccaccctgggcaacatggcaaaactccatctctaccaacaacaacaaattagctgggcgtggtggcatgagcctgtagtcccagccacttgggaggctaaagcgggaggatcacttgagccagggaggtaaaggttgcagtgagccatgatagtaccactgcactccagcgtgggcgacagagcaagatgctgtctcgagaaacaaaacaaaacaaaaaccaccaccaccaacaagaaacagactggccaccgtggctcacgcctgtaatcctagcactttggaaggcagaggtgggcaggtcatttgaggtcaggagtttgagaccagtctggccaacatggtgaaaccctgtctctattaaaaatacaaaaattacccaagcgtggtggcgtgtgcctgtagtcccagctacttgggagactgaggcatgagaatctcttgaatccaggaggcagaggttgcagtgagccaagatcttgccactgcactccgagcctggacaacagagactctgtttcaaaacaaaaataaacaaaaaaaaccccccaaaacctgacgctttgaaccgctatggtgatggctaagtgcaggcatcacatcccacagttaggaaaaaattacaaaccaaacactgggctctgagataaatcagaccaaaccaaaaaaaccagggttactctgtcaagtcctagtatcccaaatcagtgaaacttgagttgttcctggaagttgttgactccctgacctgaaattcttctctctgatttttgtaatgctaatatctgaagatgtgttatgacctttatggatatgattttcatgtgaaattttcgctgttttttctttttttcatatcattaacagacagtaactttggtaatcttgtctttttttttcttcaaaaacctgtagtgtcttctgatttggaaatccattccctgaagtctgaccatgcaattgttctgcagataacattcttcccttgtttaaaatgcatctgcttctggctttttctcccactgggaagggtccacccagaaagcctggaggcactgatctactggagcttccggggcggtttgtccaggtgcacagatgaacctagatcattttctttcttttttttttgagacggggtctcgctctgttcactctgtcgtccaggctggagtgcagtggcgcgatctcggcttactgcaagctccacctcccaggttcacaccattctcctgcctcggcctccccagtagctgggactacaggcgcccgccaccacgcctggctaatttttttgtatttttagtagagacggggttttgccatgttggtcaggctggtcttgaactccttacctcaggtgatctgcctgcctcagcctcccaaagtgctgggattacaggtgtgagccaccgcgccctgccgaacctagataatttctaaagctcctataacttggagatgatgacgttaatagtgatggcttatatttgcattcctcaatagggttcacaggcaggcatggctgctcatgtcggtaatcccaacactctggcaaacggaggctggaggatcacttgagctcaggagtttgaggctcgcctgggcaacacaggtagaccctatctctataaaaaataaaaaaattagccaggcatggtggtgagtgcctgtaatccttactaaggaggctgaagtgggaggatcacttgagcctaggaggttgaggctgcagtgagccaaaatcatgccactgcactccagcctgggtgacagagtgaaaccctgtctcaaaaaaaaggagtcatagtgtacttttacactcattttatcctttgatcctcccaataaggatgcatttccttttttttttttttttttttttgagacagagtctcgctctgtcgcccaggctggagtgcagtggctcgatctcggctcactgcaagctcaacctcctgggttcacgccattttcctgcctcagcctcccgagtagctgggactacaggcgcctgccactgcgcccgggtaatttttttgttgctgttgtatttttagtagagacggggtttcaccgtgttagccaggatggtctcgatctcctgacctcatgatccgcccgcctcggcctcccaaaccaaagtgctgggattacaggcgtgagccactgcgcccggccaaggatgaatttcatgatgcaataaagcttaaagcttaactctcacgaatctgttttttttttttttttttttttttttttttttttttttttgtgagacagtttcttgttgcccaggctggagtgcagtggcgtgatctcggctcactgcaacctccacctcctgggttcaagcgattctcctgcctcaacctcctgagcagctgggattacaggcttgcgccaccatgcccagctaatttttgtatttttagtagagaaggggtttcaccagacctcagatgatccgcccgcctcggccccgcagagtgctgggattacaggcgtgagccaccgcgccgcctcctgtgtttttttaactgtttgctggctttgtttctgttttactttctagattctgtctgattcttggccaggtctgtttctggcttgtgttctgatttgtatacagcgacttatggccccttcagtgaggttttcatgatctgaccattaggcgaactctgccagacagcagactgagcaggaattctgattattggtagtagatttttgttgttcttgttttggtttgtgtgtttatcttggagatcccaatgtctcctggctcctcagttttgtctttattgtttatatacagtgtgagtgcaatttattcaattagaaaagggccttttctttccctggaatggagagcagcctttgattcctgtagctcaaccaattggtcagttttgagttctgcgttttcctttatgatttgtgggcaaagttaacaaaactgaaaaagttggctctctttctgtgtatctaaatttatttatttattttttgagacagggcctcactctgtcatctaggctggagtgcagtggcacaatcacagctcactgcagcctccacccccctccatgctcaagtgatcctcccacttcagcctcccaagtagctgggactacaggcgcatgccaccacacctagctaatttttgtattttttttttttttgtagagacggggtttcaacatgttgcccatgctggtgttgaactcctgagctcaaacaattctcctgcctcagccttctaaagtgttgggattacaggcgtaagcctctgcactaccctgtgtgtctaaattttaaaaagccttcccctttcttgccaaaaacaggtatttaccctttacaatcacctgtttatactctctctgcctccctctctctctccctctctgtcttcatttaatatctgtgattctcttggctttgcccttttccaatattggctttatcccagggccagcagcattatggttgtagcacttccaggcataacattcagataccactgggtgtggtggctcacgcctgtaattccagcactttgggaggccaaggcaggtggattgcttgagctcaggagttcgagaccagcctgggcaacatggtgaaaccccgtgtctacaaaaaaatacaaaaattagccaggtgtggtgacgggctcctgtggtcccagctatttgggagactgaggtgggaggacctcttgagcccaggaagcagaggttgcagtgagccaagatcacacactacactccagcctgggcaacagagtgagactctgtctcgaaaaaaaaaaattcggatgccacaatatctgaaggagaaaataggggcctttttcttctctgactgttagaaataggaaagtttttccagaaacgccattagattttcactcaggcttcatggctagaattggatcatgagcttgggcaacatagtgagactctgtctctaatatacatataaatacattaaatagaattgggtcatgcatgtccattcctacatagggccctgagaaggaaaatgagattcttgtggctggctaaatgacccatctggggtgaaaggaatgttggggaactagccacaatgaccaccatcaattctacaataaaaagagaatcgagggccgggcacggtggctcacacctgtaatcccagcactttgggaggctgaggcgggcagatcatgaggtcaggagttcgagaccagcctggccaacatagtgaaacctcatctctactaaaaatacaaaaattagccaggcgtggtggcacatgcctgtagtcccagctactcgggagactgaggcaggagaatcgcttgaacccaggaggtggaggttggaatgagccgagttctcaccattccagcttgggcaaaagagtgagacataatctcaaaaaaaaaaaaaaaaaaaaaaaaaaagagaatcggggccgggcacggtggctcacacctgtaatcccagcactttgggaggccgaggcgggtggatcacttgaggtcaggagttcgacaccagcctggtcaatacagtgaaaccctgtctctactaaaaatacaaaaattagccaggtgtggtggcacatgcctgtagtcccagctactcgggagactgaggcaggagaatcgcttgaacccaggaggtggaggttggaatgagctgagttctcaccattccagcttgggcaaaagagtgagacttaatctcaaaaaaaaaaaaaaaaaaaagagaatcagggccgggcacggtggctcacacctgtaatcccagcactttgggaggccgaggcgggtggatcacttgaggtcaggagttcgacaccagcctggccaaaatggtgaaaccccatctccactaaaaatacaaaaaaagttagccaggcatggtggcgcacatctgtaatccaagctactctggaggctgaagcaggagaatcgcttgaatctgggaggtggaggttgcagtgagctgagatcgtgccattgcactctgcactccagcctgggcgacagagtgagactccatctcaaaaaaaaaaaaaaaaaaaagagagagagagagagaattggagtggattggagttttcacctgtaatgtataacgctagaagcatgggaatgtgtaaaatatcatgaccgcaaacattcagaaagcacacgccacaatatcctgagaaagtacccactagaaaatgaaaagctaatcagaatttaaaattacagggaagatacagacgtggtcagaacatggtgagtatgagatgctgaataaggcctcccaaagatgtccccatccatctactgaaacctgtgaatacataaccttgcatggcaaaaggacttggagatgtgattactacaaggatcttaagatgcaaaggttatcctgggttatcgggtgggcctaatggaatctctttttctgagaggaagacaagagagtaaaagctggaaaaaggagacgtgatgaaagaacagaggctgcagtgatgtgctttggagatggaggaagagggaggcggcatctagaagcaggaacaggcaagggaatggattcttcctgagccctagcaagaacgcagctctgctgacaccttgatttcagcctcacggaacccatttcaggcttctgacctctgttaaatagtaactttgtgttatcataagctattaaatttgtggtaatttgttacagcagcaatcaataaacacttatcatgaatgaccaaaattaattcaagaagaggttaaacaaaaccctgaatagaccagcaacttctaaataaacagaaaaccttttattttttttcttatttttaaataaaataccccttctataaaggcatcagatggtcctctaggtgagtggccttcaaaccttcaagaaacagatcattcttatggtatttgaataattacagagcctaaagattcacggaagccaggcgcagcagctcacgcctgtaatcccagcactttgggaggccaaggcaggaggactgcttgagcctaggatttcaagaccagcctgggcaacatagtgagacccctgtctgtataaaaataaataaatataaaaatcctgaatataatattagcaataaatctaccactatatacctgttatagtatactattatgaataagggaagtttattccaggaatcagtgacagctaaacattaggaaatctacaatgaacttacactaacaaccgaaaagagaagaaaaatttgattatttcaattaatactaaatatatatatatatatatagagcacagtggctcatgcctgtaatcccagcactcttggaggccaaggcaggaggatcactttgagctcaggagtttgagaccagcctaggcaatatagtgagacctctttgtctctataaaaaatatgaaaataggctgggcatggtgcctcatgcctgtaatcccagcactttgggaggccaaggcaggtggattacctgaggttgagaccagcctgaccaacaaggagaaaccccaactctactaaaaaaaaaaaaattcaaaattagtcgggtgtggtggcacatgcctgtaatcccagctactcgggaggctgaggcaggtgagttgcttgaacccaggaggcagaggttgcggtgagccaagatcgcacaattgcactccagcctggacaacaagagtgaaactctgtctcaaaaaaaaaaaaaaaaaaaaaaaggaacaagaaaacaaaattagccgggtgtggtggcacatgcctgtagtcccagctcttcaggaggctaaggtgggagaattgcttgagccagggaggtcgaagctgctttgagccgagatcaaaccattgcattccagtccaggcgacagagagagaccctgtccccccgaaaagaaaaaaaaaaaaccctgataaaattcaattttaatacatgcttttaataatatatttcagcaagttaagaaccgtatatgaacatacttatgactatttatcaagcatcaataacaaattcatcatatccctagtccagtgagtctcccattccctagatgagtactgattagactagggatatgattgaaatagaagacagaattttaacgaggtgcattctttctgaataaatctgcagatataatgcaatgtcaatcaaaatcctaacactttccaagtaacagggttctttgttcttttaattgttttgttttttgttttttattgagatagggtctcactctgctgcccaggctggagtgctgtagtgcaatcatagctcactgcagcctcaaactgcggggctcagtcgatcctgtcacctcagcctcccaaagtgctggggctacaggtgtgggctactcacctgtacaatgtgctcagccaaccacacgttgttttaaaagctatttaccagccaatagagctacttctttcctccttacttttctttttcagagtttttgttatatcttttcctgtttacactatcaattgcttttagaatcattctattaaattttaaaataatggaatacacagtagtggactaaaacctaatatattaattgaaaattaattttcctgtgctactttttggaaggaagtcactgtgtacaatccacctttaaggagtgaggagttatgctctgtatcacgaggaccttttgttttttgttgctattgtgaaagatttcttttagtattttcatatatgttattaccaatataaaggactgatatgacttgttgaagaacttctatgtagcaactttattaaacccctttatcaattctattagcttttgttcatattttatttctttgggttgtgtggattttttttaagagatggggtctcactgtgttgcccaggctggtctcaaaactcctgggttccagtgatcctcccacctcggccttccaaagtgttgggattataggcatgagccactgtgcctggcccggtctgtcaatttctactgtgagtaatccctttgccttttctttcctaacattatacattacatttccatttcctgtcttattacatcagtcaggacttccagaaaattatcaaaaaacagcagtgatcagagatctagtgaatatcctcgggtatttgtctgttgacactctcagttcttttgggaaactgcgctactccatatgtacagtccttgtgggacgagaccagtcacagggcacctaaccctaaccctgtaggttcaaagctgggtgcatggtccagggccagccaaacatcagaccctattttcccacccagggcgattgttccagaggtgggcaagaaacctaagcagggccaaccagattttctcccagttttttgtttgttagtttggaaccagaagagaggaggggagggccttactttctggtttaacagacgggaaagataggaacgagggtatcagaggccaccactgtcacttgcacaggaagagaaaggctgccggcagaggaggaagagaaactacggaaagaatcccaaggggcgaggagaagggaggagagggacagagatgggaagagggacaacaagaatgatctggttttgttttttttttttttttgagtggagtctccctctgccaccaggctggagtgcagtggcgagatctcggctcactgcaacctctgcctcccgggttcaagcaattctcctgcctcagcctccctagtagctgggattatggcgcgcgccaccatgcacagctaattttcggtacagacggtgtttcaccatgttggccaggatggtctcgatctcttgaccttgtgatccgcccgcctaggcctcccaaagtgctgggattacaggcgtgagccaccgcgcctggcctaatgaccttgttttcaaatccctgaatccaaacttcctgattatgtgagccaaaaaatttgttttccattttctctacttacattggatcattacaacggaaggaattttgactattagagaaatcaatcttgtcctggtaactgacacttattaggtaacggctggtgccaggctgagggcaggtggcactgactccggtcctccgcccaggcaaccccagtcttcacagctggcgacgagtgttctttcacgtttgcagatgaggaagctgaggctctgggaggaaagcgcgctgctcctgcccttctgggccgcagcctctcgtactcccacagcaggcttgatggataaacttccaacacgaccagctggcacaaactgtgctacttggcaaatgggagcatgttgctctatcctggtagattctaagttctctaatggaacaactgatgagaggagaggagtatgcaacaccctaaccagcatcaaagggtgtacccaactcaatctgcacagcaaatgcgcccaaccccacacaccccgcggggtgctaaccgagtcacggctcgaggcctctgggtccttccacgccaggtcattcagaacctgaaacccccagcggaggtggagagccggggtgagtcctggcgtccgagacgtggaggacccagcccccggagcgcgttccgttagtttacagagctttttcaaactttgccttccaagtgcaggagttccttggtctttgcaagacccgcaggcgtccgcagtggtgcagagagaggtgcaaggggcgcgcccaaggtcgcaggctgcctggctgcgcgctcagtcgggcccccgggcgccaggcgcggggcgggctctgggcgggcggccggggcggggactgcagagcaggctgcactgcgcggtacccactgccggcctgcgcggtactcactgccggcctccgcggtacccactgccggcctccgcgctacccggccgcagcgcgcgagtcacatggaagctcctgaggagcccgcgccagtgcgcggaggcccggaggccacccttgaggtccgtgggtcgcgctgcttgcggctgtccgccttccgagaagagctgcgggcgctcttggtcctggctggccccgcggtgagtaaggtggcctcagtggcaggccggtaccggcgggctggggacctggtgatttctgcctccgcgggtgactttggcgggctttggggaccgagcgagctgtccgccggcgggctccggggagcatcgtgccaggagccgggcgggcaccccagctcctctgcctgcgtcccggccgctttccgctccgcaccacccgactgggggccccgcggggcactgcgggaacggctggtacgcgcccgggcgcatgttggctcggagaggccggcggctccagcctcctgcgccaggagacaccggagagctgggacctttgcccctaacggggctctaccaggtccaggctgcatttgcatccgggggtgccttctctgggagctgattccggccaataaaacgcaagttgcctgaacttcaaaacacaagggaacttgtttctttgaaaagtagcggtcaaaagttcgggagctctgcgatctaaataatcccgaggcacggaggagggggtgcgtggtctgtcgtggactcagagctgcgaaatgatttcttcagaattcagtcaacctctaccgaggaaaccagaggcatcctgtaccaccccctccccgccagtaattatgtatgtgaaagaaaaaaggggttttaatgtggttctttgtggggtcgaggtgttcttatctgtgggattcttttctttttaatcattaggttagggctgtttctgccttgtctcctaaaaataatgtggttttaaaaaccacaaaaacacaatcctatccacgttctcctgccagcttgggtggttttcaaaccgagagggtaggacgcggcacaagaagcaactggtatgcacttaaggcgtgaataagcttttgactttgaggcccacattctgcacctgcgcgggctgaggggggccgctgtgcctctggagtgggggctcggtagtttgtgggatattgtggcacccgctgtggtgtgcaggacagcaagggtaatgccgaggtcaaagccatggaataagatccatcagccatgctttctcacagaccagaaagaactcatgatttggggctgggcgcggtggttcacgcctgtaatcccagcactttgggaggctgaggcagatggatcacttgaggtcaggagttcgagaccagcctggccaatatggtgaaactccgtctctactaaaaatacaaaaattagccagacgtggtggcgggcgcctgtagtgccagctactccagaggctgaggcacgagaatcgcttgaacctgggaagtggaggttacagtgagccaggatggtgccactgcactccagcctgaacaacagagtaagacttggtctcaaaaaacaaaacaaaacaaaacaaaaacacctcatggctgggcgtggtggctcacgtctgtaatcccagcactttgggaggccaaggcaggcggatcacgaggtcaagagattgagaccatcctggccaacctggtgaaaccccgtctatactaaaaatacaaaaaataaaaaataaaaattagctgggcatggtggcaggcgcctgtaattccagctacttgggaggctgaggcaggagaaccgcttgaacccgggaggcggaggttgcagtgagcccagatcgcgccattgcactccagcctgggcaaaaaaacacctcatgatttggaatctcaagacctggggctgcgtgccctgctttgacctccgaaagtaagtcaggaagcagctgtgcagattgaaacagcctcctaacctcttctggtctctgcatattcatttgtaaaatggagataataatcatgtcttggttcaacactccctcacagagctgctgtgagaaggggctttctaaggctattattgttttattattattattattttttgagacagggtcttgatctgtcggccaggctggagtgcagtggtgtgatcacagctcactgcagcctcaacttctggagtagcggagattacaggcacacaccaccatgcctggctaatttttgtattttgggttagagatagggtctccctgtgttgcccattgcttgaattcctgggctaaagcaatcctcctgcctcggcctcccaagagctgggattataagcataagccaccttgcccagcctgttattgctttaatagtatagcaataataataataataataataataataacagggcaggtttctgaaatccagccctcccagtagcctgatccccttgatgtgggggacctctccaggtctccagggatgagcactagactgacatgctggggacctcaccttttctctttgtatgtacatatatgtataccattgtgtttattacaaatgtcatgcatatttactgtagaaaaaaatagaaaaccaagaccaacaataggaaaaaaccctctgaaatctcaccgctgagaggtaatttgggagctttccttctagtcctttgtgtgtgtgtgtctctgctttgtgaaaatgtgattgtagagttttgctacctgcttagtctctcatgaagtgtatgtggaccggcctgggtctgtctcccatctctaatcccatctgctataaagttttctgtttactaaagggcatgggataaggagagaccacccccttcttttcccatgctcattgtccaatactttcttctccaagtgtccaacataacatgaggaagatgccctgtctggctctcctctctgtaattttctctctcatttgccatctcccttccagacctctcaagttaaccctgacccttgaggtctcactgggctttaaatgagggctttgtaaagagagtaacccataacacaatggaaatgtgagccgaatggtgcttatttctcaaaagatgcgtccattttatcctggagaaagcttgaggaagactggatttgcaagggagggaacgtgcagatacctggcctcaggtactccagctgtgcctcttcttggtcatcagcctctcatcacctggctgaatcaaaacagcaaaagttctgaaaagtaaccccaaagatggaccccgggcattgcccgggatgtaacagaggtgggatagcccaggccccagctcagggaaatgtttccacttgtgtgggaaggagctggcggaccttctagggttacagggcagaaatatcagagaaggcaggcaggttgaggggggtgaggtgggggatctggagagaaccgctttacccgggacacacaaaggaaaaaatgcaggctgatcttttgaattgtatcctgaaggcaatggggaagatattgatcaggaagtggttactgacaccaaattctgcaggggaagcctggtcagagacagacaggcctaggcccgaggaggggaagacctacagggaaggtggttccttccattcaaagggtgagaggaagtagtcaaagatggcaggagctggacagaggaaagccgggtgaggtccggcccccacgcctctactccccgttccctcctccaatccgtcctcaccaaggcctttggctttagctccttaaatacctctcagagggatccactttttcgtatctccgctctcatgctccaaatggagccaccaagtccttttcaaacgcacatctgagcttgtgcctcctgctcagaaccctttccttggttctgcaaagccctctatggcctggccctggccaggcctccagcctcatctctcgtccctatctcctggttacaccctccacccagcctcctttcagtgcctcagcctggaaagtcctccccgacagacaagtctccagcacctgactatttgacattgacttgttcatcatgcaggtttcagccccacttcatttcccccagaaaccttctctgaattctctgctgcaccccacagctcatcatgcaaatgtcttgagctgtgttatttattgcgttttgaacatctttccctattccacagatgctccttggcttacgatggggttatatgcactgaaaatatcattaagtcaaaatgcctctaaaggatgagatcacggattgcgagagtcctgacttgcgtgggacgcatgctatccccgtgctggccaattatcttcagttccattgcaagagtaatagctgccttcttttccccagaagcaggaggcacagatggccattttgtagttatgatgggatgcaaaaacacaaaacaaaatacccaaaaaacgctggcaacacagtccactgtagagtgtcagctgcctgctctcgtgatggcagggctgatgggcagctgtggcccactgccctgacaggcactgcaagtctgagactacacatcactatccggggaaaagatcaatatcccaaattccaagtacagtttctactgaatgtacattgcttttgcaccattgcaaagctgaaaaattgtaagtcaggaccatctgtactgtgggtcccgtggggcaggaatggagtaatggtgtctaactcacacctgttcccccagtgctgggatgtactttgtgctccaaagacagtggccttatgtaaccatctgagttgagagtcaggtggctgggctagttgcgaaacctcctgggctgtgcttcctcacatgtaaaagaaggggggctgtcccaggtgacctctcagcttctttccagtgagtgaactttcagcaatcatgggagggggtaggagaggctgtctggaggtgcctggccctggagagcaacttctaaagctgccaggcgctgaaggtctttatctgactgccaagtttgcttattgttgtctggccaaaatctgagcagggtcactgtgacaagaagggacggaagcacggtcagtctggaagtttctttgtttgaagcagggtctcgctgtgtcacccaggctggaatgcagtggtgagctgagctcaagtgatccttcctgcttcaggctcctgagtggctggaattgcaggtgcatgccaccacgcatgctatttttggtattttctgtagagacggggtctctacaaaatgttgcctgggctggtcttgaactcctgggctcaagcagtcctcttgcctcagcctccccaagtgctgcgattgcagggataagccaccgtgcccggcccagtctggcaatttctgtcatccattcagctctgtccaagccactgccagttcaggctgttcttcagacagcagctgctgagacatctagcggaacaggcctttgtccagaattggttcattccccgagcacagaaatatgctctgtgacagcacagtcccagagggtctggagcactctcaaagtgtggccctggaccacatgcatcttgcctggtgtgtatgagggagcatggggatatactgaaatgaagattcctcagccccagggaactcctgggtcttttttttttgagatggagtctctctctgtcacccaggctggagtgtagtggcttgatctccgctcactgcaacctctgccccctgggttcaaacgattctcctgcctcagcctcccgagtagctgggattacaggtgtgcaccactgcacccagctaattttttgtatttttagtagagatggggcttcaccatgttggccagactggtctcgaacttctgacctcaggtgatctacctgcctcggcctcccaaagtgttgagattacaaggcgtgagccactgagcctggcctaacctcctgggtcttgcgatgggccagggcaaaggctcccaggtggcccttatgtacatgatccacagtctatggccaagcgttcacccaaagggcttgaaaccaggatctgagaagaggttagtaaatctggactcaagccaagatccctggcacggactttcaggatgggctgactgcatgaggctgcccgactcaggcagtcggagtacagggttgttgccgtaaccctggcagagctgcggcagctctcaaaaaaactatttttgctggcattgacattgaagatgcatctcacatggattagtctaactcagctcgacttcctggccttttgtatccgagacatctaatgattcccttggactggcccccacccaagtgagaaagatgttcaaggcagtgcaatttgtgatggtaagatctgggcagcactccaaaggccgggcagtaggggagaccgagcacacttccatgtgaagccatgaaaaacagctcacaggtggcccacagggaggcagggaactgtggagtgtaaacgtgatgttccgtgggaaaggagaagacagattctgtgaacacaaccatttgttacagatgatgtgcaaaagcttaaagcacagtgaactgaacagatttggaagtgatgccgagtttacaaataaaagggaccctgtggcctttaaagatacatgaattcacaatttaaagagacaccaagctccacccagtgaaaccacaggggacatctgtaagggtggtgacaacgcccaaatcgtgtggcaccattacaggcctactgggcatccattggctctaggtttagattctccagcatctggttcttcatgtcagccttttttattgacacctccaccccaccccctttttattcccatcttctgtcttattttggcttacgcaaaacattgcaaaagcgctcctcacgttcagtagcagggggactgtggcgattaaattcacattaggcttctgtggtagtgagagaagtgcctggatcatgtaggagttcatacaagaaagatacttctcctacaacagacacacacacacacacacacacacacacccctagggttaggaacaggctgtgcttgctctgaaggtctgggcccatcacaggagttgaaaacagtctctcccgggatgtggattctagggaagaaaagagggagatcatcggaaccattatggctcgggggcctgatgaggtcctgacgtagcagttttggggtggctgcagagctggcagatgggctgtgtgtgagcctggtggaggtcagctctagaacctaagtcattggagccctaaaagagggacctttctgtgggctcagcacagaggactctgttctccctgagggcggtgagaggcggccttgtggctagaccagcagcagcatcaccaactctggggtatcagcttcagtgagggccccatggggcagatgcaggcagcggcggcagcagcaaatccttacacacccattctctcctagggagcaggggtcaggtgaactccccattttgggccgtgtagcctgccaggggagaggggcttccccaagagagatactggaccgcctgggtctagtgggtggggggcaggaggtgattttaagttaacctccagaaataagctcattatccaatcatgcagtgaaagcactgtggagcaattcatagaattgcccactggaatttcgaggaagaatggttcaatattccagaatttgccctcacatctgaggcttcctagaatgcaaggcgttcagcaggcctgtaatgtttcaccctgagagtccggatcccgctgggactccaagtggacgatctcatcgctacctccagctcctcctgtctacagacttccttgctggaatgtgttcttgttgttgaaggctgtattctctccagtcctcactaggaatcttggataacaagggggttatcccagaaggcagcctctgcacattgcagaggaaatttaatgtgatctatggcttgagaaactgaactgaaaaacaggaaaggcaggctgggcgcagtggctcacgcctgtaatcccagcactttgggaggccgaggcaggcagatcacgaggtcaggagtttgagaccagcctgaccaacatggtgaaactctgtccctactaaaaatacaaaaattaggtgggtgtggtggcgcctgcctgtaatctcagctactcaggaggctgaggcaggagaattgcttgaacctgggaggcggaggttgcagtgagccaagatcgcgccactgcactccagcccaggtgacagtgtgagactctgtctcaaaaaaaaagaaaagctgaaaaggctgggaagttctcaaaaaagtgattctgacccagtggttgcaaataaatgttttaatatttcaagaagcctcccatccccagccccagaaattgtacatttgcctgtgaaaggtggcagaggctcactgaagttgtatttctttacttctgactggacttgttgggtcggggtcacacttggggccccaggcttccctgcaatggtggtcactcacgtcccttcccgttcccctctcttcccagttcttggttcagctgatggtgttcctgatcagcttcataagctccgtgttctgtggccacctgggcaagctggagctggatgcagtcacgctggcaatcgcggtacgtgtgggctttctggcaggtttaccaacactgtctgtgtttgccttctgctgctactataacaaatcatcaaaatgtagtggctgaaacctacacagacttattctcttacagtgctggagtgcagaagtctgaagtgggtttcatggcctaaaatcaaggtgctgcaactttaattcccctttgctgtgtaaccttgcagattcctaggttctggggattgggctggggacatctgggggggcattatcctgtctatcacatcttctcatttattttattttattttattttgttgttttttttttttttgagatgaagtctcgcgctgttacccaggctggagtgcaatggtgcgatctcggctcactgcaacctctgcctcccaggttcaagcgattctcctgcctcagactcctgagtagctggggttacaggcgtgcgccaccacacttggttaatatttgtatttttagtagagatggggtttcaccatgttgcccaggctggtctcaaagtcctgagttcaagcaatccacctgccttggcctccgaaagtgctgggattacaggtatgagccaccgtgcccagcctcacatcatcttatttcttttcttttttttttttttcagacggagtcttgctccgtcacccaggctggagtgcagtggtgtaatctcggctcactgcaacctccgattcctgggttcaagcaattctcctgtctcagcctcctgagtagctggtactacaggtgcctgccaccatgtctggctaatttttgtatttttagtagagacggggtttcaccatgttggtcaggctggtcttgaactcttgacctcaggtgatccacccgcctcggcctcccaaagtgctgggattacaggtgtgagccactgcgcccggcctacatcatcttatttctaatccatggaactcgttcccactcttggtcccacagttgggggaggggaacagtaaaaggggagttcagtctgacttcctcagaggaactgactcccccccatgcccactcctcagttgtctgtcttactgagagtcctaatctagaaatgggtctggaaggtaaaaatctagatctttgtgtccaaacttaaaattgggaggaactgcaaatcctctctgtataatagatgcaaacccccaaaaccagagacatgtcatcaatctcagccaggaattgtcagctggccatgtaagaacaaagggtttggtttgtctagttaggttgtttctagaaaagtggattcagtggctctcgggcaggtgtatgttcccctttcctcctgccctgacggagacacaatttcacttgatctgcctggtctcgccaggcatttgagtttgctatccatgaactacgcgaaacgcctgggaactagtcaccaagtatatgtggagctagctatgagtatatatggcttattttattttatttaattatttattttgagatggagtctcgctctgtcgcccggtctggagtgcagtggtgccatcttggctcactgcaaactccacctcccgggttcaaatgattctccagcctcagcctgggattacaggcacatgccaccacacccagctaattttttgtatttttagtagagatggggtttcaccatgttggtcaggtgggtcttgaactcctgacctcgtgatctgccctcctcagcttcctgaagtgctgggattacaggcgtgagccactgcacccagcatggcttattttattttggctttagcgggcaacatggacaatcccaggcttaattatccattttgtttttaagtattgtatttgcaatagaggagaagacagaaatgcacttagcaagcctcagcagattctctttggccaaggaattacaggatgtggccaaggacttatcaaagtcagtgcttccaggctgggtgcagtttgggctgttgtccacaggttccctgctgtagagtcaagtggaggtaccaggttccagatggggagcacatcagacatcctgtgataccactccctggtttggggggcactgctctaggctcctcgaaacttcagggtttgctgctgaccctggtgaaggcgagcacacctggaaagcctctggcactagtccggacttcagaccgcctctgcactcccagtgccccccagggtacggacgcaggccatgctaggtctccagcaggcggacttttctgtgttactgtgccattgcattcccggaagaagtgtccctgatacccgaaattggagagcaaagtgactttttaaaagagaaagcctgggtaatcacctctagcctaggcttttccccttccaaacttgtacatgtccttacccatccaagatcttgtaaccgtaataggcttgtcaacttgcttgtcacaagtcaataatctgagatggcaggttgcaacagtgaaagaggtttaattgtaaggccactgaatgaggacacctcaaatcagtctctctgaggagtttggggcagggtgtttaaggattttcgaatgggctgaagtgtgattgttgattggttgaagagtgcagcatgaagtcatgggacagggagatgaagaaactgtgttctcatgctgattcagttcctccttgtgggtctgcaaactggttggtgtcagatgtttcactggaattcaggctctgcttaataaaaaatttttttttttttgagatggagtcttgttctgttgcccaggctggagtgcagtggcacgatctcagttcactgcaacttccgcttcccgggttcaagtgattctcctgcctcagcctcctgagtagctgggaatacaggcgcccgccactatgctgggctaatttttgtattttagtagagactgggtttcaccatattggtcaggctggtctcaaacgcctgacctcgtgatccgcccacctcggcctcccaaagtgctgggattacaggcgtgagccactatgctcggccagaaattttttttttttgagacagggtctcactccattgcccaggctagagtgcagtggtgcaatctcagttcactgtaacctctgcttcttgggatcaagtgatcgtcccacctcagcctctggaaatagctgggactacaggagcatgccaccatgcctgctagtttttgtacttttgtagggacgagttttcatcatgctgcctagactggtctcaaactcctgggctcaaacgatcctcccaccttggcttcccaaagtgctgggattacaggcataaaccaccacacctggccaacaattcttaaacaatagccttatcattgtaacaccagaaatcccatctgtaggaacagtggggatgtacatggccagtgtctggtgccacatgactttcagttataaggaagtgggtcaaagtgcagcctgattaatactatagttctaggccgcgcgctgtggctcacacctgtaatcccagcactttgggaggcggaggcgggtggatcacgaggtcaagagatcaaaccatcctggccaacatggtgaaaccccgtctttactaaaaatacaaaaattagccggtcatggtagcgcactcctgtagtcccagctactcgggaggctgaagcaggagaatcacttgaacccaggaggtggaggttgcagtgagccgagatcgcgccactgcactccagcctgggcaacagagctaaactctgtctcaaaaaatatatatattatagttctgtccagaattcttgttaaacctgtgagaatggcttcagtatgagtggggtccaggcagctaacaaagttggtaaaattgacttgtgaatgctgaaggaggagctttgcaggctcttatcaatacacacagggattttgtcttcctttcctcctttaactctatagggccttatctttgggtttatttgcaggttatcaatgtcactggtgtctcagtgggattcggcttatcttctgcctgtgacaccctcatctcccaggtaaatggaagtggtcacacgctcacagtgacctcaaacatcttttctcaagtgtagatggaagagctccactggcaggaagagttcagcagccagcacttgcagcacctatcagccagcaactcctcttctcctggcctgctttctttgaaatgtcactaggtttctttcagccttgtcaactagtttttgtctgcacaactgccttaccctatattttgatcaaataggggacattttgtaaaattcccttctattgctccccacgtttgaatttggtatagttctgtggttctcagaattgagcgtgcattgattgagcttggagagcttgttaaaacccagcttgcctggccccacccagtggcaggctggtaaatgttcagcaaccaggccttgggtgaaaggggaaggagggaaacacatgactggcagtgtttgccagttccaggggcgtaagtatttcctctggttaatttcagattaccagagatgtcactgaacctggagctggaagagatgtgcacgacttgaaaagatgtacaaaatttggcttgttttgtttggagacagagtcttgctctatcgcccaggctgggctgcagtggcacacccactgctcacggcagcctcgaactcctgagctccagcgatcctcttgcctcagcctctcaagtacctggtattacaggcatgtgccactacacccagctaattttttgtagagatagggttttgccatgttgcacaggctggtctcgaactcctgggctcaagcaatcctcctacctcagcctcccaacatgttgggattataggcatgagccacaatgcccagcctggcttttttttttttttttttgagatggactctggctctgtcacccaggctggagtgcagtggcacaatctcggctcactgcaaactttgcctccctaaaaaaatttttttccagtctctaaaaataaatgaagtgtgaatttcagattgtttacctctgcaaaagaaattgttttaaatataatttttttttaaaaaaaggtacggatctctgaatcctgccctgtgtgaattaagtccagaatatcattagtgagagttttgaaaatgttcccctggtgatgctactggaagctgagtttgagaagcatctttcacaccatccttctcctacctaaacactggggcaaagtgtctagggccatgggcttcttttttttttttttttttttttttgagacagagtcttgctgtgtcccccaggctggagtgcagtggcgtgatctcggctcactgcaacctctgcctcccaggttcaagcgattctcctgcctcagcctcctgagtagctgggattacaggcgtgagccaccttatccagccaacctgcttctttgtgtggcacaattgaaggcttttaggggacagctggtgtgctgggtctgtgctaatgggctcattttggctgtgtgcaccccagacgtacgggagccagaacctgaagcacgtgggcgtgatcctgcagcggagtgcgctcgtcctgctcctctgctgcttcccctgctgggcgctctttctcaacacccagcacatcctgctgctcttcaggcaggacccagatgtgtccaggtaagatggaacctgtcgcagcgggacttggcgtccatcccacggaaagattatcctgtctgggtgcagccagggccagggacaaggctgcacaccaaggtggtgctcatctctccttggctgacgtctcctaggtcttagtactttccacacctggcatctgagatgtactccccctcgcctcctgggtgacttgcatggttaagagttttaaatgaaaatagatttgcaagcaccctccatgtgggatggtagtttgtgacgtttgctcaaagtttagttattcttgaccttcgttgatattaaaatcacctgggtgctttcaaacccacctgtgcccctgctccctaccacccaagatttttcttttttttttttttttttgagaccaagtctcactccgtcccccagactggaatgcagtggtgcgatcttggctcgctgcaacctctgcctcctgggttcaagcaattctcctgcctcaggctcccgagtagctgagattacaggcacctactaccacgcctggctaatttttgtacttttagtagagacggggtttcaatcatgttggcgaggctggcctcaaactcctgacctcacgggatctgtcgcctcggcctcccaaagtgcatgagccaccatgcccggccaggattctcttttaattggtctgtggtgaggcctgggtatcggtatctttcaaagcaccctaggtgattctactgtgctgtcaagtttgagacccactgatttaattgggtaagagcttttaaagctcttatctagaccagcggctctgaacccaggagacgtttgacaatgtctgaagacatttctggttatcacagctggcagtaggagggtgctcctggtagaaggcaggaggctgtggaacatcctgcagtgctcgggacagcaccacacaacaggtggagaattacctggccatagtgctgaggttgaaaaaccctgtcctagacataaagatataaaataatcaagaaaggttatcagggttataagatgacaagctctatatgtaaattttcacatttgctccgcagttttgtttttttttttgagatggagtctcgccctgttgcccaggctggagtgcaatggtgtgatctcagctcactgtaacctccgcctcctgggttcaaaagattctcctgccgcagcctcccaagtggctgggattacaggtggccgccaccacacttggttaatatttgtatttttagtagagacggggttttactatgttagccaggctggtctcgaactcctcagctcatgaactgcttgcctcgggattacaggctgggattacaggcgtgagccaccgcgcccggcctgctccagcaacttaagcccattaatctggaaacagccaagaatggaaaaggcagttttagttattttcttctgcctaactttccctggaaacagaggcctccatcacagtttttgttttctttttcttttcgttatttaggcttacccagacctatgtcacgatcttcattccagctcttcctgtaagtgctcaagggctaagagattcccttcttggggtccgtgggtgaaaggtagccaccatatctgtgagctcagtgtattggctcagtcttagatgattcttatctgtggtgttggtgccttcaaggaagcctgtttttatttatgcctgttaaggacacaacagatgttcatctcaaggaacaccaagattgaggctactccaggacgtctggagtagagctggagagacctccagaatcatccatggagaagagtgcaaacttttattgtaaacaagggcaaagtctcacccatctcagaacccctgagggtgtcacttagaacctttagacttttttttggtctgctgcgtttgaccacacagaaccttaagcatgggttaatgtttgacacagcagtgtgtggccaatgaacaatgagagctaagtggtttttttgtttgtttgtttggtgtttttgagacagggtctcattccatcacccaggctgaagtacagtgggatcgtcatagctcactgcagccttgacctcctgggctcaagccatcatcctgcctcagcctcctgagttgctggaactacaggcacatgccaccacacttggctaattttttagttttgtagagacagggtcttgctaattttttttttctaagatagggtgtcactctgtcacccaggctgaagtgcagtggcacagtcctcactcattgcaacctctgcctccctggctcaagtgatcctcccacctcagcctcctgattagccgatactacaggtgcacaccaccacgcccagctaatttttgtattttttgtagagatagcattttaccatgtttcccaggctggtctcaaactcctgcgttcaagcaatccatctgctttggcctcccgaagtgttgggttgcatgtgtgagccaccacacctggcctgagagctaagtgtttgttattcagctggaggctgtagctgaattagtctgcaggggcttccgtaatataataccacacactagggagcttaaacaacagaagtttattttcttacagttcaggaagctggaagtccaaggtcaaggtgcagcagggttggtgtcctctgcggcctctctccttggcctgtggacggccaccctctgcaggttgtcccctgtgcattcatcccccggtatcccctgtcttcttatgaggacacgagtcctattggattagggccccaccctaatgacctcattttaatttaatctccccttgaggacctccaaatagtcacactggggactagggcttcaacatacggatctagggacaccatttgccctcagaattggcagtgtgctcgcttacttatcctgaaaccttgtaaatgtgacagtctttcatgattccaccacataggaccagtctatatggaggtgcccatctggagtgtgcctggggcctcctttccatgccagtgtccccagaagagtcctggccattcacccagggaaactccacctccttttgccagatggagggaatatgcttggggcatatgcacccataaagaagatgtgggaagcccctgggccataacaccctggccccagccctgtcctgagacgacagcctctgtggctccgtgcgggagcagagggcagccgaaccttggctgtggctcctagctccctgccgtgtgacctcacttctgtgtggcaaggctgaaacattaacattcatctctcttgttctcttgtaggcaacctttctttatatgttacaagttaaatatttgctcaaccaggtaatactgactgttctcttcctttgggaggctaatgggagtttgtacctttctgggaatgggggccctgaagatactccaggaccagggaccccagggtggagggagctcactgctgggagccactgaaagatattttttcagtgttgtgcacacagaacttggatgtcaagaggtttgttaagtgatgtcaaggaaagaacatattatatttggctctggaaaactcttatccaattcccacttggaaatattgtcattggcagggtgggctcagagccgcagtgttccttggctctgcattttaaccagcgtcctggaaagaagggtgcatgcccatttgctcctaagacagagcgcaggctgggggcagctcgtctggcagagagggaaccaaactgtctgctctgttctgtcggaatggccccacttttctcattgaggatgtaagagctcaaactctaatgacacctaacgtcagccagaactcctcctctgtgattaaacagtcagggccaaaggccatggcttggtaggggtggatttatgaaatcagcatatgtgggactctctacattcttccagataagtccaggtaaacaggggtactcggcaatggatcccggccacactggcgggctctccaggcatgtgcaacaggaagggccaggaggggaggaggaagaaaggaagtttcccacctatgcagtgttcttaaagttaagatattcctctattagaacaaaatttttaaagtagatatggggtcttgctatgttgcccaggctggtttcaaacttctggcctcaagcaatcctcctgcctcagtctccaaaagtgctggacttacaggtgtgagccactgcatccggccaggatattactctatcaacaaaacaagaatatttagaatcccgattagcatagaatgacatatcagaaataggtgtagactagagagaaggaaacccacacatttcatccggctttgggctgtctccttttgatctagacccttgctaaggcagcatggatgccttagcaccctgcaaggccttctcctggactcagtcccccaaccactgtggtggccctaacctcagggtctgatgtgacctgctgaggacaatgagtgtgaaagtcttctttcctgttctctggggcacagggaaaggcatggaagtaggagccacgagctgagaggggttgggagctttgaacttggttacagaggacacgtggagtttccaaggttgggaaggaaggcaggggatcctagacagaggtgcagcagagcctgttcctaggggctggggcccgcagagtctctttacgccactgcggtgggaggggatgcagtgagatgatggcatcgagaggcgggctggcccagggtcagcgtgcgcagggccttgtgttctctgctggggcatttagttttgggaaattaactaattgggagaggaagaggggagagttatggacatgatccaaacaaataatggtgaaggtctgtgatgaagagtttgcgttgtgggagcagtgggagatacgatgatgggtgggttctgtagaaatggcaggggttgttgggcccccagggtggaaggagtttctgtcctggggcccttccctaggaagacagggcaaccattagctgagtgtagaaccaaagagaagcagctgggagtttggagaaagtgaatgccctcggagagggtggagggtgggaacagagccagatggtatcgggggaagggagactttcaagtaggagagtcaagagggctttggaggagaaggtgactccactggacatggagacgcatgcgtgttgcaggcttggccacctcttctcgttctcccacgagcctgctcctctgccttccattccatcgcaatgggtggaattccgtggcctcagccatttttgctcccagtaacctgtcctttttgtccctgtcacatcctcgactccatctttccttccctcccacatctggtcagtcacctggtcctatagcttctgcctcctcccaatcctccatgccaccacctgaattcatttctttcttccttttttttttttttttttgagatggagtctctgttgcccaggctagagtgcagtgacgtgacctcggctcactgcaacctccacctccgaggttcaagcgattctcctgcctcagcctcccaagtagctgggactacaggcgcgtgccaccacgcccagctagtttttgtatttttagtagagatggggttttaccatgttggccaggctagtctcaaactcctgacctcaggtgatccactcgccttggcctcccaaagtgctgggattacaggcgtgacccaccgtgcccagccctgaattcatttcttgccatttgtcctctgtgtcatttcagaggaccttaacctgtctccatccactgccatctgcctgaaaagtaaatctgatcactaattcccttgctacaaactaaccagggcctccccataaatatgtggcctacacaagttgtcggccaagaccattgtcctggccccatcagcctgagaccaccagagacaggactgtaggccagtgggtttgcagttgtgtttattggcctgtcgcagtgagagagactagagaggctgtgggatgcctcagcaaaggaagaagagttattataaaggtttgaagaagggtggggttcaggtgacatttaagcgaaatcatggtttgataggcgctgagcagatctgtgagtgaggggcccaacatcaggcctgggctgtgacgtggacctggtgctcctcctttggaaactcaaggctaagaaggatgttgagggtggacagatgtaaaatgccacatccaggagctcccacgaagctctgtgcctgggttggaaattgaggctacttttttgtgttaacatgattttgagcctccacgcgagagtggggtgttttctttttactgaaatgatttcaaacagcaatgtttctgaacagtctgattttagacaacaaagtttctcagtgagtcagaaagcactcgtcattccactaggggagtaatgacactttatggggacagcgtgaccttgggagaaaggaggtttccttttacgtttgcactgactttatctgcgtctgctattctatccggatgcggggcaggacagagttttacttccttggtctgatgtaattttactttcacccctgtcttactttgagacaccaaacagtctggatgtttcaccagtcctgtacttttgaaagttagatatgttggaatcccttccgtattctagaaagaaactctagtttcttcaagatcttaggtcaattttctgaatttctattttggtgaagaaagtattctcattttctcctatcgtccagtgtcaaaggtgccttgttgacccatttagcccctgccagtccttgcactgttggaaataagccatttatcttcttccttccctgctgctgaacatatcttgcctgtgtctctctgtggccagaactccgcactttatacctcaaagagagaaggaagagaaaggggtgggagagtggaaaggcaggagcaacaaggacatgacctccccagttaagccccccagctatgcctgtgatacccgctgagcaggccagctggagcctgtgtgtgcttgggtagcagaaaggcagtcctattctgtggatctcaaggatggcatgcggtgtcctttttccagggaattgtactgccccagatcgtaactggagttgcagccaaccttgtcaatgccctcgccaactatctgtttctccatcaactgcatcttggggtgatgtgagtccaacatactcttgggacagggagaagggatgacttgcatgtggtttttccaggagggagaagagtgggctcttcagctggttcttgtgtccatgcgtggtctctttcttgcacactgtggaaagcactgtcagggatggagggtgaggctgctctgggaagaagaccttggcctgctgaggacagcacgggaagggatgagtctcccctcctcactgagttgggcagggagaggcgcaggaaggtacctccctctcattgggactgttctttccagaggctctgcactggcaaacttgatttcccagtacaccctggctctactcctctttctctacatcctcgggaaaaaactgcatcaagctacatggggaggtaatgactgcccttttgtcttccaactgggatgtgggttttgtctcaggttgagttccagcccgatggccagatctcctggaaatgtgtgtgtcccccccacaggctggtccctcgagtgcctgcaggactgggcctccttcctccgcctggccatccccagcatgctcatgctgtgcatggagtggtgggcctatgaggtcgggagcttcctcagtggtctgtatgaggatggatgacggggactggtgggaacctgggggccctgtctgggtgcaaggcgacagctgtctttcttcaccaggcatcctcggcatggtggagctgggcgctcagtccatcgtgtatgaactggccatcattgtgtacatggtaagcaggggagccgatcatggggaggtgccaggcgttttccttgcttggtatctgaaagagtctatggatgagcacaggcattcgtacatgaatcatttgtgaaatgatggacaaaagtcaaatcccatccttgagcctgggagggtacctctgctacagctggatcttccctaggaactgaaggggggctggagagaaactgcacatgatctgctggttctccatctcctaacgcagctcccagctgaatcttcccttgaaagatttgattttgtttccatacttttagaatctttttcagttgtcacaacacaaatgccttgaggggccaggtgggtggcatagcagagggatgaggctgggtgtatgaccataaacatcaagctgcctgtgtcactatgcccgctcctgcctggttctgaagcctctgaaaacacagtgtggctactgcaaggtagatccccaaaacaactgaaagcagggtcttaaagggattttttttttttttttgagatggagtcccactcttgttgccctggctggagtgcaatggtgtgatctcggctcactgcaacctccgcctcccgggttcaagcatttcttctgcctcagcctcccaagtagctgagattacaggtgcctgccaccacgcccagctaattttgtattttcagtagagacagggtttcaccatgttggtcagctggtcttgaactcctgacctcaggcgatctacccgccttggcctctcaaagtgttgggattacaggcgtgagccaccgcgcctgacttgttaactgtgttcacaggagcattattgacagtagacaaaaggtggaagcaacctatgtgtctgcgggtaaatgaaatgggttctatgcatacagtggagtattattcagccttaaaagggaggaaattttgatcatagagaacactagtcattaggaggcttttctttggctttattttcctgaaaacatcaactggagattctgaaggaagcaagtaccattttagaaatgtaaaattaaaaacaaagggagtttataatgtggggagaaactcaagccagcagatatgcttggcattttttgcagtattaacacttagattttttccctctgatattggttatgttttaaaacatagagtacacattttctgttttgtttaagaattattctcttgcagacctatgttttttgtttttgtttttctatccttggcagagttttttaacatggattttttacttcacttttaatattttatttacattttatatttgagtaaattcattaactatatctaagtcaaaatgcttaatggtatataggattccactatatgtgatatacttttaaaatcaatttcctatggttgaatagtttatttccaatgtttcaatattaacaactcttcaaggaacatcctaggaaaaaatatcttcatatacttgtctgattatttctttaagattcataaaagtgggcccagggtatgttcacggggcgatgctgccctcccagctggcccatgggtgaccctgggaacattaactgcctcacaacgtttgtgcctcagttacccgtagatgtagtgagggtaacaatacttactctcgttggtgataaggaacagctaacacaacacacagggtttttctgctcccaaaatgggattcttcagtgcaccaaatcgaagaaagcactggagctcacgctggtttctccattgtttctccttaacagtggaaactgtaacttttgttctagtagcatctagcatgctcaataattatttgtaaataaaagttatactttccctccaaaaaaaaaaaaaaaaagattcataaaagtgaaacaaaggtacgattttatgtcttttgaatatatttccatatgctttccaataggcttgtaagaatttacacttgtatttcttaatcaaaagaaagatgtatgccctttcctcaggttcaccagttttgtcacatttattctgtctggtctatctacacagtccatgttcaaatactatatcaatacagtcaattcaaaacaataccaattgttctggtaatgtcccttatcactaattttcccctagcgtcatatctctttagtgtcctttaatctggaacagatcttcattgttccttcgtctttcttgaccttggcatttttgaagaacataggccgttatctgtagaagttcactcagtgtggtgcagctgatgtttccttataaataaatttagattgtccgttttgggcaggaaagctagagaagtgatgctgtgtccttcttagtgcaccatatcaggaggcacatgatgttgatctgtctcagtgttggtgatactactttttacttgttggtggttgtttttattttacttatttttttttttttaagacagtgtcttgttctggtgacagcggcctgatcttggcttactacagtcttgacctcctggactcaagcaatcctcccacctcagcctcctgagtagctgggactacaggcatgcaccaccactcccagctaatttttaaaaaaaatttggtcttgttatgttgcccaggctggtctcaaactcctgggctcaagcaatcattccaccttggccttccaaagtgctgggattacaggcacagccattgcaccctgccagtattaactttgattgcttggttaaggtggtacctgccaggtttctcctgtcaagttactacctttccctttgtaatgaataaataatttgtcaggcgatctctgtttgtccctacttgtgaatttataggcagagactcagtcttctattacttttttatttctcaatctgtgtatcagattttctttaagctggtccatagtcatcctgatcctaaggcaatgttcatgtttcaacaagtgatgactcctttttccttattaatattaatttttcaagtggtaactttataaataatagtaatggtaaatctttattgagcaattcctacatgcttcttctaagcagttagcatgtatggactcattaagttcccacaatagcccaatgagataggttctatgattcaactccttttacagataaaactctggaggttttgagagggtaagtaacttgctcagggtgatgcagctgataaagtggctgtgctgggatttgagcccaagcaatctggcttcagaatcctgatccctaaccacaatacagggttgtttccctgcagttcctttagtgccactcctgtcttctaagctggatcccttgatggtctttcagaacagacactatgccatgtgtggaggcgcatgcctgtgatcccagctacttgagaggctgaggttgcaggatcgtttgagcccaggaggtcgaggctgtagtgaactatgattgtgccactgcactccagcctgagggacagagtgagaccctgtccctatttattttattttatttatttattttgagaaggagtttcactctgtcgcacaggctggaatgtagtggcactatcgcagctcactgcaacctccgcctcccaggttcaagcgattctcctgcctcagcctgctgagtagctgggattacaggcgtgcaccaccacgcccagctaagttttgtattttttaatagagatggggtttcaccatgttggccaggctggtctcaaactcctgaccgcaagtgatccacctgcctcggcctcccaaagtgctgggattacaggcatgagccaccacgcctgacctctgtccctatttaaaaacaaaaacaaaaaaaaaacagacaaaacctgggctcctggtgagtcagtccatcccccgacacccagaggaggaacatggttgtgcagcaccctcatgtcgcagaggttggaagctctgcagcaaagcccagtttgtgctaagcatcgtaacctggggctcagtttccacagtagcgtgggagttcccggctagacaaaggggatgttgcaaatcagtcttttcaaaacttttaggaccaagttttcccaccaggtgtgaggcatgaggctgcttctctgcacgtgttctcgctctgcagtttctcactcattgttgcaggtttcctttttattttaggtccctgcaggcttcagtgtggctgccagtgtccgggtaggaaacgctctgggtgctggagacatggagcaggcacggaagtcctctaccgtttccctgctgattacaggtgctgagacccctttacccgaggctcttggtgcagtctctgcatgcaaaacccaggctcctccacttcctgtggatcttcttgttcactgtgttgtttcttctgccgtttttaccttcagtgctctttgctgtagccttcagtgtcctgctgttaagctgtaaggatcacgtggggtacatttttactaccgaccggtgagtgctaggattttcttgaaatgtgaaatctgtgataaagaaatggttcattgagaaaatttgttctctaaaatcaggctgttcagaaacattgctgtttgaaatcatatcagtaaaaagaaaacatctcactcacacctgtaatcccagcactttgggatcacctgaggtcaggagttcaaggccagcctgaccaacatggtgaaaccctatctctactaaaaatacaaaaattagctgggtgtggtggcagacacctgtaatcccagctacttgggaggctgaagctggagaatctcttgagcccaggaggcagaggttgcagtgagccgagattgtgccactgcactccagcctgggcaacagagcaagactccgtcttaaaaaaaaaaaaaaaaagaaagaaagaaatggttcctccaagagcaagatgccagcagaaaaagttttttaaaactaggaattttttttaaaaagaggccgggcacagtggctcacgctggtaatcctagcactttggtatgtcaaggctggcagatcacctgaggtcaggagttcgagaccagcctggccaacatggtgaaacccccatctccactaaaaatacaaaaattagctggtcatggtggcacacgcctgtaatcccagctactcaggaggctgaggtgggagaatcacttgaacccaggaggcagaggtgccagtgagccaagatcgtgccactgcactccagcctgggtgacaagaatgagactccatctcaaaatttaaaaaagaaatggttaaattggatagatgctatcatagaggccacctatggttgttgcagcagggatgtctgactcatttgcaagatcagaggctcggccgggcgcggtggctcacacctgtaatcccagcactttgggaggttgaggcgggtggatcacaaggtcaggagatcaagaccatcctggctaacacggtgaaaccccgtctctactaaaaatagaaaaaattagctgggcgtggtggcgggcgcctgtagtcccagctacttgggaggctgaggtaggagaatggcgtgaacccgggaggtggagcttgcagtgagctgagatcccgccactgcactccagcctgggcgacagggcaagactctgtctcaaaaaaaaaaaaaaaaaaaagatcagaggctccactgatgttacttgggaagaacatattagatgtaggaactgatgtataatctacagtgccaacttaatgggcattggtaatgattttatgcttctgctggtcatgtattttaaaggtggaaacccctttttagtacgattaattacattttcagttaattattttgtttccagtgataagaatcctcttggtttcttagtatcggccaaagtgcccggtttgtagtagttgcataatatgtttgtcaaactgaattgaagttaaaatctcaccagtgagctgtctcaaaagtcatattctcagattgattactgaagaattcttggataagtcccctctgctctgcagaatttgtttccttcatcagcgatgctagtgtgtacattcggactatatagaaacttcgtgggggtacttcttatttggacacctttgtcagcagttacaaaatgcaaatggactttgccttcctggattcagaaagctggtggagcggacagaactaatttcatggtttattcttcacacatttgacttttgacttcagatcgtaggttttcatttttcagcttcagctattttgttatggggaaataagatgtttaggccaggcacggtggctcactcctgtaatcccaacactttgggaggctgaggcagatggattgcctgagtttaggagttcaagaccagctggtcgacatggggaaaccctgtctctactaaaaatacaaaaaaaattagctaggcgtggtgaggcacgcctgcaatcccagctactcaggaggctgaggcaggagaatcacttgaacctgggagacggagggtgcagtgagctgagattgtgccactgcactccagcctgggcaacagagtgagactctgtctcaaaaaaaaaaaaaaagtttataactccctcactcagaatgagtggggaaggcgatggcaaatagttggcttttctcacaaagggaatcaggatgaactttatgaggaccaggataaatggatggtttcagaaggaatatagtagaagctggactctgaatctgtccacttgggaaaccatacagcccaggaaaagaatgaaaaacaagaggcccacaaactatagaactgacgagatgaggaaacatcagaaactcaacaatcaaattacttgtaaggtggccaggatcaacccaacctggtagaatcggtgaaagagatgaacctctacctaacttaatcacagggggcgggaaacggcacctctaacaaataaagggggacgttactactaaacacaatcatttttaaaaatcctaagagactactttgcacaactttttccaaggaaatctaaaaatgtggaataaacagataattttctagggaaataattgatcagtatgtaccctagaaaagatagaaggtctaaataactgatttcctgtaagaaataagagaaagcttttttttttttttttttttttttgacggagcctccctctgtcgcccaggctggagtgcagtggcatgatctcagctcactgcaagctctgcctcccgggttcacgccattctcctgcctcagcctcccaagtagctgggactacaggcgcccgccaccacgctcggctaattttttgtatttttggtagagatggggtttcaccgtgttagccaggatggtctcgatctcctgaccttgtgatccgcccgcctcggcctcccaaagtgctgggattacagccataagccaccacgcccggccgagaaagctattttaaaatgtcaaaaagcacaatcccagaaggttccaaaggataattttataaaatcttcaaaacatggggaattgcaaacatagataaaacagaaaatttcagagcacaggaaaaggaaaactttgcattctgtttatgaagcaaatataacattggtgccaaaatctgacaaagtttgcacataaaaaagaaagaaaatcacagatcactcttatgtattaatatgaatttaaaaatccaaaataaaatgttattagacataggctgggcgcggtggctcacgcctgtaatcccagcactttgggaggccgaggtgggtagatcacgaggtcaggagatcgagaccatcctggctaacatggtgaaaccctgtctctactaaaaaatacaaaaaattagccgggcgtggtggcacgcacctgtagtcccagctactcgggaggctgaggcaggagaatggcgtgaacccgggaggcggagcttgcagtgagccgagattgagccactgcaccccagcctgggcgacagagcgagactccgtctcagacaaaaaaaaaatgttattagacagaatttagcagcacattgaaaagaatatatttgggtgaaatataaaagtgaatataggccaggcgcggtggctcatgcctgtaatcccaacactttgggagactgaggcaaaaggatcacttgagcccaggagttcaagaccagcctgggaaacatggcgaaaccccatctctacaaaaaataaaatttagctgggcatggtggtgtgcacctgtagtcctagctactcaagaagctgaggtgggaggatcacttgagcctgagaggttgaggctgcagtgagccatgattgcatcactccactccagcctgggtgacagtgagaccctgtctaaaaaaaaaagtgaatataatatctcaggtggaaaaagcaaggtgcagaacatcatatagagaatgctgcatgtgaaatgatagaatatagaaaggaaaattaagaatatacatttgtatttgcttatattttcatagacactagacaaacatggaacgtgctaggaattgttacctggaggaggcagggctggtactggggcaaactggaagggcattgcagtaagactttgcttactatcttgttcatattgttccattttttgaccatgtgcatgttacctattcaaaaaataaaatttgaataaaataattatatttctgtcctttttggtgaggaggaagtgatcatcttgttcagtgctggatttcttttcttttcttttttttgagatggagtttcgctcttgttgcccaggctggagtgcaatggcacgatctcggctcatcgcaatctccgcctcctggtttcaagtgattctcctgcctcagcctcccgagtagctgggattacaggcatgcaccaccacacctgctaattttgtatttttagaagagatgggagttctccatgttggtcaggctggtctcgaactcaccacctcaggtgatctgcctgccttggcctcccaaagtgcagggattacaggcatgagccaccactcctgggccagtgctggatttcttatttagtaattaaacaagtatttattgggagacagtcttctaggttctagtttagagtgacaaaactcactccaagggtgttgtgaatttcctgcttccccaggtcagggcagcatttttctcatctcccttcacatgcagaggttagaatccaagtctctagctttaggggttccatttctaggaaccaaggataattctgcagaatatatctatggcctttaccaaccttcgttccatagagggaacttaatttttactctgtagtgcttcactgaggcttactaggagacacagtcagacttggcctgtggcatcatcttaaaagaaggatgatcatagcatccaaacttgccgggatgataggtgcgtgccactgtgcccagccaaacttcttttcagctgatggggaacgggggagggatgtcaccaaatcccttgatttgtctacactgaccagatggactatgcggtaacccctctttatccttggttttgctttccaaggtttagtcacctgcagtcaattttggtctgaaaatctttttttttttttttttttttgagatggactctcgctctgtcgcccaggctggagtgcagtggcatgatctcagctcactgcgagctctgcctcccaggttcacgccattctcctgtctcagcctccccagcagctgggactacaggcgcccgccaccacgcccggctaatttttttgtatttttagtagagacggggtttcaccatgttagccaggatggtctcgatctcctgaccttgtgatccgcccgcctcggcctcccaaagtgctggaattacaggcgtgagccaccgtgcctggtggtctgaaaatcttaagtggaaaattccagaaataaacaattcataagttttcaattgcgtgcggttatgagtattaggaggaaatctcacgtcccgcctgggacatgaaatcatccctttgtccaacatctccacgctgtgtgtgctttccacccgctagttatttcagattgactgttttggtatcacagtgctagtaatcccaaagcacaaaagtagtgatgctggcatgtggttatggcctactttattactactgttgttactctcttactgtgcccaaattatgaattaacattatcataatgtatttgtgtataaggaaaacacaatgtatttagggttcagtcctctctgcgatttcaggcatccactgggggacttgaaacatatctcttgaagacaagggtgtggtgctgcctattttttctaaaagctgtgagatacaacatgcagttagtttcctctatggacccagcaacaggtgaactgtccctgactaggctgctggcctcaatgcatgtgcatgtctgtaatatgcagaaagctatatacttttttttttaagacagtctcgctctgtcattcaggctgaagtgcagtgatgagatctcagctcactgcaacctctgcctcccgggttcaagcgattctcctgcctcagcctcctgagtagctgggattacaggtacccaccaccaggcctggctaattttatatttttagtagatacggggtttcaccatgttggccaggctggtctcaaactcctgacctcaggtgatcctcccgcctcagcctcccaaagtgctgagattacaggcatgagccactgcgcctagccagaaagctatatacttctttctccactttgtctcctaatcaccacgtgctttattttcctaacagagacatcattaatctggtggctcaggtggttccaatttatgctgtttcccacctctttgaagctcttgctgtaagtattatgtagtagtcccctaagcactgttatgatcttctgatggtggtaaatttcagctgagaggaggggccagcataggtaggaagattgaatattgttaccacatttcgtttagaaggatactgtcaccttaccatggattttagcacagaatatgaagtgctcgggagatgggagtgtttcaagagcgccggatgtgttcacagtgatggaatgctctctgcctgcagtgcacgagtggtggtgttctgagggggagtggaaatcagaaggttggagccattgtgaataccattgggtactatgtggttggcctccccatcgggatcgcgctgatgtttgcaaccacacttggagtgatgggtaagctctaacctctgcaggcagggcttagctgctcaccagcccaggaaatgaccgtcggagcacacgggtctttgactgaggctcacctctgaaactcgggagctcgcccacgtccattctgtgtcttgtcagagagtgtagggggcgttcaggaggtgacctccagctctagccagggccccaaggctatgtggtcctgcccctcacacccctgcgggcgatcttccacgctgacacacttgagcacagatgccctttctaccaacctcctatcctgagtcatccagccctcacttctctaaaggaggcaacagcagggaccgctgaagaagcatttggaagcatccccttagtgtgtttcgtgctgttctttagagacagcatgtgagcccctgagggtgactctgcagggccagggctatcgtaggcggtcctgcgtgcgtggggtgctgcagggtctgcactcacggtggcactctgcatcctagagcagtgccccatgtgctcaccaagcagcatggctggatccttggagggcaatgggtggccagtgcccttctcatcaccctcatcgcactccgcagcctccacctccctccttgtgcagccttagctctgtgcccccacagagctccccacaaggccatacacgtggtcggtgtgaacagcacagaaggaagggggcggacttgagcaccttcccacatttggaagaaaaaacttaatccacagcatctgaaattaccagagctaatctttttaaaaagtacggaaataaatgactgcccagctttgatttctaaaataataatttggaacatattggcagttaataaatgatgatatgaaaacctggacatttatctttggggtgagtagtgactgacttaaagcgtggcttgttttgattcatctgtacttggcaggctcagaggtggtgagaagtcaactgatacctacagggaacttccagttcagtatgttcctttatgtggcacatttttctcaagttcaataatattttaattaaaaatacaggagttgttcaaagaatagtattgccaatgcaaagttcattgggcttgcatgatagtgcagaaaattatttagctgagtttctggtgcgattcatagtttggatttgccaattgcctagctaatgcaaatattatagaaatctaatttatttttatttttaaagtaatgtattttatgtaacacaatatgtctaaaattattgcaacgtgcaatcagtataaaatattaaggaaataatttaaattctctatattatatcttttaaactttaaattgacaaattatagttgtatacatttatggggtacagtgtggtgttttgatatatgtataaaatgtggaatgattaaattaagctaattaacatacttatcaccacttattttttatggtgagacatttgaaatttacttagttaattcaaaatgtgcagtacattgactacagtcaccctggtgtgcaattgatctcaaaacttattcttcctgtctatcagaaatttgtaccttaacaactccccattcccatgccctcccctccttgccaccagtccctgctaaccatcattctactctctacttctatgagttcaacttttttagaagaggagtctactttattctcctgtttcattttttacagatggggtcttgctatgttgcccaggctggtctcaaactccttgactcaagtgatcctcccaccttggcctcccaagtatctgggattacaggcatgaggaacctgctttgaaatataaatccatctgtatcccaagtgccgtccttggctcacctattcatttaacagaatatatctaggccaggcacagtggctcatgcctgtaattccagcactttgggaggctgaggtgggtggttcacttgaggttaagagtttgagaccaacctgggcaacttggcgaaaccccgtctctactaaaaatacaaaaattagccaggtgtggtggtgtgcgcctgtagttccagctacttgggaggctgaggcacaagaattgcttgaacccgggaggcggaggctgcagtgagcaagatggcaccactgcactccagcctgggcgacagagtgagactctaccttaaaaaaaaaaagcgtaactaattgtgcaaagtagaagaggaagttgagaatcactgaaaagaaatggtgggggccctggggatgtgagggctctatgagaagcctatagtcaatcccccccacccacctattagaagaaattgtggtacgaattggttttgagtattgtgtctcctggtatggtatgcagtatacctatacaaggtgtctaggagagcatcagaattctgcaggttctcagaagcaacctcaggaaatcataatgaccctcagaatccctgggagacattttaaatatgtaaattcctgggccttgcccatgagatctaataatcatcccactttgggctcataggttgggtcaaatagaaatcttttaaatgatgtatgctaaaattattggaaatctaattcataactttcaaattatagctggagttagctggttatttcctgtttaaggtggttcaggtgagcttgtagtttctatgtactgagaacactggatttgaaagaggaagccagtagcttgcttttactaattttttataggactagcaggtggcaccaactatactattctaagagcaggctaggctgggcgtagtgactcatacctataatcctagtgctttggaagccaaggcaggaggatcacttgactctaggagttggaggctgtagtgagctgtggtcatgccactgctctccagcctgggcaacagagcaagaccctgactctaaaaagcaaacaaacaaacaaaagggcaggctgatcatacctgaaaaatgtgattggtaccaagaaacagagctgtaaaacctgtaccgaatccataaaccaggaacccagactagccaccttaacccttacatagatctggacagctgtggaaataaaccaggaccaaccaagcaagacaagcaaagtctgtgtattctcagcaagggtgttggctgccaccacttgcatttgggcagaaactcaaaggcaggcaaaggagtgggaaagcgtcacagtggataaaaggggaggctgcaggtgtgtcctgagtggagattgttgatctgggggatgctggaggtggctgactagaaatgggcctcccatgtgattggttagggggatgtattttactttctctggttggtcctaagttggaagtgcagaccaaaattaggcaagctgtcagttgctaatcaagtcctggccatctggggccaatcgttacagaagttactggttagcttcctggattgttaccaaaggcagcgatcttgcttcctgcaagtctgatttagggaaggctggcttcctgggtttattgtagatggggtggggtttcttgggcagggtgctgcaggttgtgaggcagaggtctgtttttattacggtcaggactttgtctcttggttattgttggagcttttggttctgccattagtttactgttgaccaaaaaaccctcctcacctggggtctccctctgtgccctgtgtggtgccttgagattcacagggcttttcccgccatccattcccacctggcctgcctttggtgttctccagtcatctgtaggtgctcagccctgctctggaagcttctagcaaagtctgtgtcagaagcaagttaaggtccaaggtctggcaggaactctgaggaagagaacattagtagtttatatggctagtgatttctgctttttttttttttaatgttagtccccttttttgaggaaaccagggcagaagtagttggtcctgggaaattttaatttccttataactggcatttttcttaatattcaagcattataatcagtaaggccaaaaatatcctctgaatatttgttccgaaatcctgaaccaaaagagatggcccttttgggggtggcctcaaggagtactgggctttccagaaccttctggaaccttctggaagcctgaggaggagcaggatagaggtctctggcccgctgtgggctccacctcagccatgaaagcagatattcagtatggctgacagaagtgatataggcaaaacatactccccaggggcagctggttttctatggaattaacctctattaaatatttctatttctaggtctgtggtcagggatcatcatctgtacagtctttcaagctgtgtgttttctaggctttattattcagctaaattggaaaaaagcctgtcagcaggtaactatgttcattctgtcccggtaaaggttcctctcctagaaaaacaggatctgatctggctctcccttttttcttttggaaagttcttttctcattttctttattcttatctcatgaatactattgttcttgttgttttaactagacagttcagatgtgaagggccagatgatcctggctttatctattcccagaaaaacaggggactcctttcttccttgtctcccatgccaggctgtcacccttgtgcaggaaaatccaatttcaggacaagaattagaactggagagaaatgtgggatgcatcaaagtcatcctgatgttgtttttatggtctccaaatgttttgttaagatacttgtgtgcatccttcccttcaactttctagggtcagtgtgaggtctagaaataggtggtagaaaaatgagatgagtcgaggtacagtggcttatgcctgtagtcccagctattcaggaggctgaggcaggaggatcgcttgagccctagagttcgaggctgcagtcatctgtgatcactgcactccagcctgagtgatggagcgagaccctgtctctacaaataaaaatgttttaaaaagaaagagataaagtaaaaagggagagttctaaatgatcttggtccctctcttgtccctgtctccctcaccctgtactgttcccatcccaccttccctttcatggaccccatttcagccttttctgttttctttttcttaagagacaggctctcactctgtcacccaggctggactatagtggcaggatcacatctcgctggagtctcaacctcctgggctcaagtgatcctcctgtctcagcctcccaggtagttgggaatacagacatgcgccaccatgcctggctgttttttttgttgttgttgttatttttttgtttttaattttttaattgagatgggatcttgctgtgttgcgcaggctggccttgaattcctgggctcaagcaatcctctctcctcagccccccaaagtgctgggattacaggtgtgagcactgagcctggccccatttcaatctttatgaaagatgacctgtgaatgagaggaacttcagctatacatgccaattaaggaaaatggcttggctcttcctaaactaggtggtcaagtaaaataccatattaacactattgtgaagcctgatggactgagtttcattttccaggctcaggtacacgccaatttgaaagtaaacaacgtgcctcggagtgggaattctgctctccctcaggatccgcttcacccaggtaagatatgactccctcagcccttggacaggcctgtctaggtaggactggaggggctgttagtgagacacagctagatttgctgctatgagctctcatttaaatagggcaataatgtttcagaaacacatgataaagccaagtaacacacaattcaaggtaaactgagttcattccacacattagtaaaccgctatagatgactgaaaggtccccagttcctcccctaatttctgcaagcactttgcaggcatttctaacacttggaaatactgtgcttctaccatagcttagaaactgacatttgtttgttttaatggggtccctgctgttcatcaggcagacacttgtgggctttaaacaggtcgttgcttggacctttgcttctgattcacattgtgcaaatgtggttatggttttcttcagtcagttgagtaatccccccgattcctggccccttaggcagttagccacccactctcagtaacccttgctcctttataatttaaacactttgacttcatagaatggctgatacttagtcagtggtcagttgtgttgtttctgccaattttcattcatgttgtctaggctcctgtgctgtgtgtctggttatctttgattttaatttatttttaaattaattttttaaaattaaagaaaaacttttttttttttaaatagaaagagggtcttgccctgttgcccatgatggtgtgcagtgtagctcactgcaccctttacatcttgggctcaagcgatcctcctgccttggcctcccaaagcagtgggattacaggcgtgagccaccacacctggcctggttatctttgattatgttccagactttatatttgaaaattgttcatagaagtaacttgagcctgaaagaatgttgtctatttatcttcagagaggattttcttttccttctgttggacactgagggtgaccagcagtctagggcaatcttggaaatggagctttctggagcacccagccaaactgaaggtgtgctgcagccagtgtgaggcttggtttacttcttctggttcatgctttttttttttttttttttttaaaagcagtctcaccctattgcccaggctggagtgcaatggtgcgatctcagctcactgcaacctccgcctcccgggttcaagcgattctcctgcctcagcttcccaagtagctgggattataggcgcccaccaccatacctggctaatttttgtatttttagtggatatggagtttcaccacgttggtcaggctggtctcgaactcctgaccacaagtgatccaccctcctcggccccccaaagtgctgggattacaggcgtgagccaccacacctggactggttcatccttaagtcttggatgcagccctttggggttctaaccacaagtacagagaggtttgccagggcctgattcttggtaggtacccaagtcgccaaagccctggtcagcgtctcagtcatgtgatctggatgtaggtctctctgacctgcatcctctcatctctctgatctgaatgaactctctgatgtgaagcagcctcagaggctgggcagcccctctgggtttccttcgtccctggatcttgccctggtgactcttcattacattgtttgcattctgatgccttcaagatgatatttaatttgttttattgaggttctataatgatcttcagggaagggttggtggatgttttctaccatcttgccaatttccctgatttgtgaaatccgcataacaatagcacttatccctgttgttgtttttgagtctcactctgtcgcccaggctggagtgcagtggctcgttttcactgcaacctctatctcccaggtttaagtgattctcctgcctcagcctcctgagtagctgggattacaggtgtgtgcggtggtgtaccaccacaccctgctaatatttgtatttttagcagagacgggatttcaccatgttggccagacttttcttgaactcctgacctcaagtgatccgcctggctcggcctcccaaagtactgggattacaggcgtgagccaccacacccggcctaacaatggcacttacttttatactaccgctgttggggttgagaagcacccagaactgcctgaccagggaaagcattttgttaagtgtgagctggtatgattctgttcaaaatgattttctttttctccctccctccctccctccctttttctctctttctctctttctctgtcacccaggctggagtgcagtggtgcgatcaaggttcactgcagccttgacctcctgggctcaagcaacctgcctgtctcagccttccaaagtgctgggattagaggcatgagccactgcacccggcccaaaatgattttctttcagaactctgaggatattgctacattcctaacattcatccacttatgctcattaggaagtgggatggccaagcttattctcgtgccattatgtaatatgccttcatttttctcttcggaagcttttaggacattttcttattattattcctttttttttttttttgagatagggtcttgttctgtcacccaggctggagtgcagtggtgcaattatagctcactgcagtctcaaactcctaggctcaaacagtcctcccgttttagcctcctgagtagctgggattacaggtgcgtgccactatgctcagctaactctttaatatttttgtagagaccaggtcttgctttgcagcccaggttggtcttgaacttctggattcaagcaatcctcctgctttagcctctcaaagtgttgggattacaggtgtgaaccaccacgcctggcctattactcttactgttctgaagtgtcttgagactaagtctaggtgtgaatcattatctgcttgaaactgttggggtgaaggagaagctatccccttgccctccgatggttcactgaaaaatcaacttataataaggccgatgaataagagaaaaggcatacaaatgtatttaaccatgcaaaagggaagaatcacagtcattacccaacatcccagtgaggcccaacactcatataaccaactttcagaggggagagaggagatagggcatttggtgcttctgttgagggatagtaaatgagtactagggaaaatgattgaatattttgcagaatgaatggattgggggcagggtggacagactggttccctttggaagttgaatgaacctgagagactggcattattttgtaaaaggtttggcaattgttcttcttggtgggtttgtctggcttttatgtagatggggaaaagtctctttcaaggcctgttgatctccaaagagtttttaatttaaaatactcattataccagggagccatatcttggggtgaaattctctgcaatccttcaatacttagtaggccctttgatgtgaacggtcacatctttctcccattctgtgaatagccttgtattctttcttccttccttttttttttttttttttgacactgggtctctctctgtcactcaggctggactgcagtagcacaatcatagctaactgcacctcgatatcctgggctcaagtgatcctcccacctcagtctcccaagtagttgggactataggcatacgccatcaggcccagcaaagtttttgtttgtagagatgaggtatcactatgttgcccaggctggtcttgaactcctgggctcaagggattctcccacctcagcatcccaaagtgttggaattacgggcgtgagccatcgcacccagacttgaattatttcttaggttgtttctccttgtgttttgttctgaaatgcttattagatgggtgttggctccttgaaaatttcccctgtgaatccttttttttttttcccttggagtggagttttgctcttgttgcccaggctagagtgcaatggcaccatcttggctcacccaaacctctgcctcctgggttcaagcgattctcctgcctcactgcctcagcctcctgagtagctgggattacaagcatgtgccaccatgtccggctaattttgtatttttagtagagacggggtttctccatattggtcaggctggtctctaactcccaacctcaggtgatctgcctgcctcagcctcccaaagtgctgggattacaggcatgagccaccgcgcccggcttccctgtgaattttaatggagagggctaccttatttctctagctcctgggagagtgctccctggagcacccaagccagcgctggtaggatcatcggtgttcgtgaaggagtgagtggaggggcactctgcgataagatttcttttatttattcactgtagcaatagtgtcctgaattaactttctctccactattagcacatattccttttatacatagccctttataaaaatgaaaaaaaaaatcccttttaagctgctaagttcctttttcctcccagggtgccctgaaaaccttgaaggaattttaacgaacgatgttggaaagacaggcgagcctcagtcagatcagcagatgcgccaagaagaacctttgccggaacatccacaggacggcgctaaattgtccaggaaacagctggtgctgcggcgagggcttctgctcctgggggtcttcttaatcttgctggtggggattttagtgagattctatgtcagaattcagtgacgtggtaggaaagaaagtcaggtcaagtgatgcttttgagcttacacacaattcacaggcccaccagtgacaatttactgtgagttaatgtcattcaggtgtgcccatggattttgagggctggaaatgcaaagacacatttttctataaaaagaaaaagcaactaaggttaaaagctatattgtggcccaagacactgtctgaaagatgacatgagtagtaattcaccactatctgaaccaagcaaggatcaatgtgctgactgcattggccaatggctttgatacttctgctatttttttagacacaaacccataaactaactgcttaagaattcatactgcttgaattatgtaaaatatattttacagtatatctttccttgggccttagattactattcactgggcaaatggtatttgtttttgttttaattttttttttaatagacggaagtcttgctctgtcatgcaggctggagtgcggtggtgcgatcatagctcactgcagcctcgaactcttgggcttcaagcaatcctcctgtgtcagccaccagagtagctgagactacaggggtatgccaccatgcccagctggcatttgttaatcttcatttgaggtctagatctaggcactgtggacactgaaaaacagttgggaaatctttcgagctgtggaaatccaaacaaagactgataattcctggtaggggtgtgtgcgtgacgtactgcagcctcaacctcctgggctcaagtgatcctcccacctcagcctcctgagtagctgagaccacaggcgtgtgccaccacgcctagctaattttttataccagggtctaccctttgtttcccaggctggtcttgaattcctgggatcaagcaatccttccaccttgccctcccaaagtgttgggattataggcatgagccaccacgactggccagaggacaaaattttaataaaggtcttagcttaagcagtaatcctacttcattaagccttcctggggtgcggtacacaccgttaattcagcaaccctcagtacatactaagtatgctcagtgctgtgaaagtggattacaccaaattaagtcattcttatcacacccaatcaaaagtcaagaagccagggataaaagcacctcaggcacataacattaatctagtaatgtaattctctgcacatccagctggtgaaactgcgtgctgtaagctgggaccagctttgtccataactgctgagagaacttgctgaagctctaggaataattttgcctgcccggttgctcaccagttgtagcttgccagctcccaacacccttcctggtgccaataaactttctcaaagagcaatactgacatttcttttgataaaacctccagccttctctgtgttgttccgacataccgaggaccaactggtctacatggatgccctgaacatgcaattctttcttccaaaataaaacattaaatagagattttgcctctacatttttgacttagtgctaggatggatataatgctctaggcatggccttttcctgaaataacaaaatcagaaaagttacctactttgagtaaaaaacacccaactgctgattttggttggggccaccttaaggtatctctaccctcagtgccttgttcttggggccacgaggcccattctccaggaaggcaggtaaaggcttgcactgtggccctcggggttgggcctgggggcagggggcagacaccacagaggcccctccccagctcctcgtcaggaaccctcgaaccctgtctccattcccctcgcacaggactccctgcccttccccttgccaggtagggcagggaccccctggggataagaggaggttctttcaaccaccagccacaaatagccgcggccaggaggccaccccgggccgccaggagcagggaggctggggtccctgcgaggcaggacccctcctctcccggaaacactgaacccgcagcaagcccaggccagaagcatgccagaaagcgccagccctgtgctccgcgggaggatggaatcaccagctcagtcctgtctgcccaccctctaggcattttgctcttccaacctgacctacaaactctcctgataaaaacccgtgtcatccaaaagcacacgaggggtcctctcacgcagggaccccttccccgagcccccttcataagcccccaagggccctcccggtgccctcccccagagttctgcgggcggcgaccattgccctgggcgtctggagcgggtccgggacggggaggggcggggctgggtgggatcgggtcgcccccctcacccccacaccgcgctgcggtcccgcgcccgcgccgccgccagccgctcccagcctccgcatggaggcccctgcggccgccgacgccccggtccccgccgagctccccgccgccgccaaggaccggcccccatagcggctccgggccctcggatggcgtgacggcttgtggggcctgcggggtgcgctgcccccggacctgcggggggaggcggctgagctggcggcgctcgcgggcccagtggtgagtgcggcgtcctcacgcccagcccgacgcctccggagcggccgccgcgcaggggtgggcgcgggcttccaggagggagggcggctgtgaacgcgccttgctttccgcgcctccgcagtttcttgcgcagttgatgatctttataatcagcctcgtcagctccatcttctgtggacatctgggcaaggtcgagccggacgctgtcacgctcgccgtcacggtgggtgcctgatttcgcccctgtaggagccgacgggcggccaagggttaggatttgagcggtgtccccaggcgctgtggctcacgactgtaatcccagcgctttgggaggcccaggtgggaggatcgcttgagctcaggagttcgagaccagcctgggcagcatagcaagacccccgtctctactaaaaatacaaaaattatcccagcgtggtggcaccgcctatggtcccagctactcgggagactgaagcaggaggatcgcttaagcccagcagatcgaggctgcagtgagctgagaccgcaccactgcaccccggccttggcaacagagcaagaccctgtctcaaaaacaaacacacagggcggggcgcggtggctaacgcctgtaatcccagccagcactttgggaggccgaggtaggcggatcacctgaggtcaggagtttgagaccagcctggccaacatgggaaaacgccgtctctactaaaaatacaaaaattagccgggtgtggtggcacgggcctgtaatcccagctacttgggaggctgaggcacgagaaccgcttgaacccaggggcctgaggttgcagtgagccggaattgtgccactgcactcccgcctgggtaacagaaggagactccgtctcaaaaaaaaaaaaaaaaaaaaaaggaaagaaaaaaaaatcagtttgaattgtatcatgtcttatgcatcttcctttacaggtctgggactgacctgtggcttaccattacctgattagatttggaaggagctcgtgtcaatacttagaaaagtgtaaaactgaaataactgcacttttttctattatgaaattaaatcaggagacttttaggtaatttaggttgtttgccattaattggattacacagtacattcagctcccaccctttcacccttgtggaaaagcctctcccatggattgaaatcacacctcctgggacgtctgttccctggcttttgttagtgatgtggaaagttgtttcttcctgcatttcatccaggctttcagagaaagtggaaaacacttctgctggtgatggtaggcggctttccctagtctcagaaaatgtcccctgtgtccccgtgagatgggtacacaccctaagaacacggagggccaccggagcttctcattcagctacatgggagccaagaccttgccaggtggaatcagtcacacattttatttacaggtctgttatttggtgaacgtattggattaagggacatttttgcttcctttgaaagtttagactgggactctaggaagaggcatgaaggcagaggagattcgtatacatggctgctccagtgtccccaccgggaaagacgagcttggcctctaccttaacaggatgatgatctaagactggcagggaaatttcctgctgtgtccccgcagggcccaggattggggtccaccttttctgattactgcttgccaaccatcactgcccccagggtgctccctgggctcacttctgggccatcggtcactcctccatgtggatgacatctaatggccagtcagccaccttgttcaagaggacctcagcatctgggtgtccactcttctcctctccccgcctctgctgtcatccctggggctgtgggctcgactctgtgacccacagtcacagctttcatttttgaaagggatcaagaccatgtaattggccgaaaatgtccacacaggtacaatgaccagatagccacctactcttaacctaggattgggaaacaggggacctcacctggagacttcgggtcttgttttaagagcaggaggatgcgctcggtgttgaccaagtcggcccagcagggaaagcagcacagcataaggatgaggacccctctctgaagtatgatccccacgcgcttgaggttcttgcctccaaaggacttgagaaaacaaatgcactgctaacagcatatgccaggcaggccgaggctgggggcctgcgccacaagcaacccctcccaggggcgcctgcccggcgcccaggcagaccggtttcccatcatctgctcccgccctccccaccaacagctgacagcattgggggagcttctgagccagggacaaccagtgagctagctggcccctgtggcattttacacgtgtcctgggacaatgtgtccctgctcccaggagctgggactgttaacatggagggtagaggtagcagaaactgaagcttaaaagagagttttcaacatgggaggcagacagatgctgcaggagaacatgtgccatggtagaaggtgaagttgtgggggactctgagggccagggatacccggggagggtgcagtggaagaaaagcacacactgtaggctgagaagggcagctagcagggtggcaagaacttcggggggcgggaggtcatggaggccaaggcagtgctctagaaagcagggatggccaagtggattaaggacggccaagcgctcacttgaggattttgtcataggaggccgggaagaggccaggcccagtgggctgggcaggaataaacaaggcatcaataggggctgagtcgggagtgcaggccaggcccgagtgcaaagaacaccttcaagaagcttggcttgaaggaggccagcagggaaggaggggtggtggtaagggagggcgattttagggtatgggagaccagactgggaggaacaaaggacaaaatgcccttgagcaggtggccccagaggacagcactagtcaagctgactctgctgttttgtttttttgtgttttttttgtttttgttttttcctgagatgaagtcttgctctattgcctaggctggagtgcagtggtgagatctcagctcactgcaacctccgcctcccagattcaagcaattctcccacctcaacctcctgagtagctgggattacaggcgcccaccaccgtgtctggctaatttttgtatttttagtagagacggggttttaccatgttggccaaaattgtcttgacaacttagctgacctaccactgcccttggccaaaggcggaagagcgcagagccccttatcaggaacgggctacagaaattcctgtggttaggcatggcgtggtggctcacacctgtaatcccagcactttgggaggctgaggcgggcggatcacctgaagtcaggagttcaagactaacctgaccaacatggcgaaaccccgtctctactaaaaacacaaaaattagccaggcatggtggtgggtgcctgtaatcccaactacttgggaggctgaggcaggagatctcttgaaaccgggaggcggaggttgcagtgagatcttctaggaagataatagactcatttttaagataactgtgaaaacaaaattttttacctttggaaaaatgttcatagtataaaaggactaataaaaatgtgttttttttttttaaataaaggaacatttatttatagtccaccttgttccacgaagaatttgaaccagtttacacaaatacttccctaaaagaaggataaataaatagctgttagaattgggtcaaagaaacatgggtggaaaagctgggagccaggggtgagttggcatgggataggatggaaactgtgctgaggttttatggaagccttgattcagcggaagggcgggcctgggtactgagcctcagccacattccccttgaccttcagaaggcagacaccatgacatggagcgtggtgttctgggctgcttgtcgccagagacagagtagcaatttttgttctatcttttataaagttgtgtgttgtaagcgagaggtctaacgtcagagctcagtttgataaaagcttgtgacagcagaagccacggggcccaaggccatggtcctgctttacatgggtagactgagccccgggggagagtaacacatttctcatttctctgtgttgggaatattcaatatcttcttttcttttatttcttttttttttttttttttgagacaggatcttgccctgtcacccaggctggagtgcagtggtgcaatcatagctcactgcagcctcaaacccctgggctcaagtgatcctcccacctcagccttctaagtagctagaaccacagttgtgtgccaccaagtccagcaaaaaaaatttttttttttgagacagagtctcactctgttacccaggctggagtgcagtgactcactgcaacctccatctcctgggttcaaacgattctcctgcctcagcctcctgagtagctgggactacaggcatgtgccaccgcacccagctaatttttgtatttttagtagagacagggtttcaccgtattggccaggctggtctcgaaatcctgacctcaggtgatccacctgcctcagcctcccagagtgctgggattacaggcgtgagccaccacactcggccaatgtccaactaatttttaaaatttttgtaaagatggggtctggtcatgttgcccaggcttcagtatccttccagctatttgaagctatctgtgattgtttcctgcagtcaccctgcagtgtggtggaacacaggagcctattccttctgcctaactgtaactttgtatcctttaacacatctctccctatcccccccatccccctacactcctatgtgacatattttttttttttgagacagagtcttgctctgttgcccaggctagagtgcaggggcgcagtcttggctcactgcaacctctgcctcccaggttcaaacaattcttgtgcctcagcttcctgagtagttgggactacaggtgcataccaccactcctggctaatttttgtattttctagagatggggttttgccatgttgtccgggctgctcttgaactcctggcctcaagtgatctgcccacctcggcctcccaaagtgctgggattacaggcatgagccgccgtgcccagctctgtgtgactttttaaaacacaaaacttcataaattagcatgctttacctttctgttttcctggcagtccgaggggtttgggagctttagtcatgcccctctgccctggctggaattcagtgttgctgtgtgggtaaatcctcattgtgccacagccctcctggggcacggttagatggagaccctggtctcatggggtcccgctgggcagtacatgtatggcctgtcagttatgtggtggggctggagtttgtgtttatcaagccagagtcgtggtcagtgaagaagctaactcacctggggctgccatcaccagtaaccgtgagacccaggacgcaaatgagggtctttcagcccctcgtcctgaatgcctcctgcaccctacctgcaggctactctatgtgcccttaattgtcagggactgggtgaggtctggtcaagagggtgacacaactagtcctgttcctcactggaggactaaagcttgggatctggagccagacttcccagacttaggtcaccatctgagtaacttgggcaagggacatacactttgtgtaactcaggttacccaaaacaaaaaatgagacgagttgtcctagcactatgcacatgaggggcttaggacagtgcctggcacatagtatgtgctcaataaaagtttgctgttattattactaaatgcacatcctactggcagatcggggcatcacctttagatgttaaccacaacttaactttatttattttttattttttttgagacagggtctcactctgtcacccaggctagagtgcaatggtatgatcttggcttactgcaacctccacctccggggttcaagtgattctcctgccgcagcctcccgagtaactgggattacaggcgcccgccaccatgcccggccaattttgtatttttagtagacatggggtttcaccatgttggtcaggctggtctcaaactcctggccacaagtgatctacctgcctcggcctcccaaagtgctgggattacagacatgagccaccgcacctggcccacaatttaaccttaaatatagaaattataatgtgctatactgtttaagaaaaactaggtttaatatttccccagttgacacaaggtggttatcatcctttagttagaaggtacacttttgttcagtaatcaataaggatagatgtagacacccatttgatctaaaatacagcatacatctgttgagttgccctttagagacaagcttgttgaggttcctccatgaagagggagctgtctgatgcgaccctgaactggcgtcgtcccctgaaggtctgccacaccaggtctgtggttctcttgcaggtggtgaacgttactgggattgcagttggcactggcttagcctcagcttatgacaccctcatgtctcaggtgaggaccaccctcccccacataccgttttttgacagttacctttcataatagagactttctaggaccatccaccctatgggttttgttgcattttatttgtcaaatacagatggtccctgacttagatttttaaactttgtgatggtacaacagtgacacgcgttcagtagctgcacttcaagccccttacaaccattctgctttccactttcagtaccgtccagtagattccatgagatagtcaacactgtatcacaaataggctttatctaagattattttactcagctgtgggctaatgtaagtgttctgagcacgtttaaagtgggccaggctaaactgtgatgtttggtaggttagatgcattcaatgcattttcaactcaagatatttctaatttacagttgtgaggtagctaggtagcccattgtaagtcatggagcatctttttaaaaaaattatatttatttttgcaggcgaggtctccctatgttgcctaggctgggcttgaactcccgggctcaagagatccttctgcctcagcctcccatgtagctgggactactggaacaaacatctgtacatagctgctaatgactggaaacacaaccagggtcagccaggcgcagtggctcacgcctgtaaccccagcactttgggatgccaaggcaggcagatcacctgaggtcagaagttcgagaccagcctggccaacatcatgaaaccccacctccactaaaaatacaaaaattagccaggcacggttgtgggcgcctgtaatcccagctactcaggaggctgaggtgggagaatcgcttgaatccgggaggcagaggttgcagtgagctgagatctcgccactgcactcccagcctgggcgacagagctaaatttcatctcaaaaaaacaaaaacaaaaaaaacacaaaaaaacaaaacagcagagtcagcttgactagtgctgtcctctggggccacctgctcaagggcattttgtcctttgttcctcccagtctggtctcccataccctaaaatcgccctcccttaccaccacccctccttccctgctggcctccttcaagccaagcttcttgaaggtgttctttgcactcgggcctggcctgcactcccgactcagcccctattgatgccttgtttgttcctgcccagtccactgggcctggcctcttcccggcctcctgtgacaaaatcctcaggtgagcgcttggccgtccttaatccacttggccatccctgctttctagagcactgccttggcctccatgacctcccgccccccgaagttcttgccaccctgctagctgcccttctcagcctacagtgtgtgcttttcttccactgcaccctccccgggtatccctggccctcagagtcccccacaacttcaccttctacaatggcacacattctcctgcagcatctgtctcccccatgtggaaaactctcttttaagcttcagtttctgctgcctctaccctccatgttaacagtcccagctcctgggagcagggacacattgtcccaggacatgtgtaaaatgccacaggggcctctgtggttgtccctggctcagaagctcccccaatgctgtcagctgttggtggggagggcgggagcagatgatgggaaaccggactgcctgggcgccgggcaggcgcccctgggaggggttgcttgtggcgcaggcccccagcctcggcctgcctggcatatgctgttagcagtgcatttgttttctcaagtcctttggagtcaagaacctcaagcgcgtggggatcatacttcagagaggggtcctcatccttatgctgtgctgctttccctgctgggccgacttggtcaacaccgagcgcatcctcctgctcttaaaacaagacccgaagtctccaggtgaggtcccctgtttcccaatcctaggttaagagtaagtggctatctggtcattgtacctgtgtggacattttcggccaattacatggtcttgatccctttcaaaaatgaaagctggccaggcacagtggctcacgtctgtaatcccagcactttgggaggccgaggcaggtggatcatctgagatcaggagttcgagaccagcctggccaacatggtgaaaccccgtctctactaaaaatacaaaaaagttagccaggcgtggtggtaggtgcctgtaatcccagctacttgggaggctgaggcaggagagtcacttgaacttgggaggcggaggttgcagtgagccaagatcgtgccattgcactccagcctgggtgacaagagcaaaactccgtctcaaacaacaactacaacaacaacaacaacaacaacaacaaaatgaaagctgtgactgtgggccacagggtctgggggctgcagggaccacctgactcagggtgacaagatacaggaccagggtgttgtgtgcctggcctgtctcccgttcaccgagtccctccattttgctgtctggcaaatgcagaaaatatttttcccctgaagtagaatagcagtgtaatcgccttcacgtatgactttagtgttgggttttttctttaacctataattccagtgtattctctggtattgtccttggggtgcgtggtcctttctagaagactgtctcgctcactgttaggtgaccctgacactttccaatggtttctgaattttgcccaagttttagttttcatgctaagaatgagctgaaaaatggaaagtggtcagactgccccttagatagcagacatttagtagacttagtgtcatgtttgtgtaggttgaagaaaaacacttaaaagttgttattaagtttctctcatttttaggccgggtgtggtggctcacgtctatagtaatcccagcactttgggaggctgaggcaggaggattgcttgagcccaggagtttgaggttacagcgagctatgatggtgccattctactccagtctgggcatcagagcaagaccctgtctctaaaaagtaaataatttttaattttaatttttagaaaatactctgtgggttcaatttgaagacaatatgaccagcaactgttttaatattaactgaagactattttgtttgtttcaggatagcccaaatttatgtgctgattttcattcctgcccttcctgtaagtttcaaggctgttgtgtctcactacatgaagcagctcacatgtgtcgccctgcacatgccccttcccccggctcttgtttctccatcttggtgcagttcatgccaaaagcccgacatgtatttcttggccctgtcgtccctcccttgctgactctcaggacatgtaccactctggtgtacagtagcttaaattaaagacaaagattgggccgggcacggtggctcatgcctgtaatcccagcactttgggatgctgaggcaggtggatcgcgaggtcaggagatcgagaccatcctggctaacatggtgaaaccccgtctctactaataatacaaaaaattagccgggcgtggtggcgggcacctgtagtcccagctactcgggaggctgaggcaggagaatggcgtgaacccggaaggcgaagcgtgcagtgagcccagatcgtgccactgcactacagcctgggtgactgagcaagactctgtctcaaaaaaaaaaaaaaaaagacaaagattgatgaggggaagacatttccttcctgattccttgttctatggttatttttgattgcaaatcaaccagaatgtttctggatcatctaggatttggggagtgctgcattcgggcaccctcggagccgttcgaaatgtcaagacggtggcttctgcctcagccagttggaatcggcctgtgtcaattcttcagggagtacatcttttatccactctggaaaattccaaatagtgccctagcattgtctcatgtgagtgaggttctctgagatcatacatcaaggggaagtgtcttatttaagattaaaaaccggaactaaactaaaccgttggaatttatattaatgagaagtgtttgtttttctgtttaaacttacaggcagcattcttgttccagctgcagacaagatatttacaaagtcaggtatagattctttttacaatttttactccataatcctggaaatgtctagtaaatattcgtagggaatgttctataacagtaattcacatttttccccctgtaattctaccttagagttctttgcctgagagattgaggccttgtaggtgaattttgtctagcccaagagagacggctgtatcaatccatcccattcccctttcaatcaccaccacctgcttcgacccctgccccgacccctcccctctcttggggctggtgccagctttgcatctggcctggggcctggctcctgtgcttctgctttagagaggagggcctggggtccctacagccactagggagcagcgaaggagtctgagggcaagatttgggtggacagtggagagaagcagagctctgcctccccgggtcccttctcgcccatctgaggccgcagccctcttgccttacccagctttggtaacagtcagctctctgtttcaatgcaggaatgaaagagaggttttactgaaagaaaatgtttgaatagacaggataaacaaaagaaatgagtgactggcgcctacaacaatagggtgaacatgttctgcacacctgctatgaagcaggcattgctgggtgtcttgtatgcaagaactttagcaacttggcacagatatcttccaagctgcctctccttcacttcatgccagggcccatttgcccttcaggaggttttttctctctgctgctcttctggaaaccatgacctaccaggttattcagaagcagttgcaagcttctggttgggataggcagataatgcaccaacggaggagactaatctggtcatctcagctcctgaccattccagtcctgagtaactttgccatcatttaaactgttccctgtttaactgtgagtgttcacttgataggctagctaattagctttcgaaaatgtgaatgttttcctatttgtttgggggttttagggcatcagcatgcctcaagttattaccaggattgcagctaatgtcatcaacgtgggcatgaatgccctcttgctgtatgccctggacttcagagtggtgtaagtcacgacccctgaattcaacacatactgaatgtctgctgtctgctgtctcctgtccctgggactggggatagcgagagtgaaatcgtctggtagagggaatatggacaggtggacaggcaatagagttgggtgttcaggtggtctgtgtgccagatgagaactgggtgccacaggacctcacaggagaagcagctggctcaggctgttggaaggaaggtcagtgggttagtgggtggagagatagggatggtgcctgggaagaagcgatgtgtaagctgattgtgtgttgaggtggaattcgcctagagaagggagttgctgtggtctgtgaaggctgaaaggggccaccccagcaaagacagagtagggcagacaccttagggattctcctagcatcttggaattgtaagaaactgagcccaattgcatccttatgaagcttgaggagatgagggtcccagaaagaaaacactatcaattcactggtccctcactgggggacacttctgtgcctagagccagagccaggctcctcagtgtggccagaaaatctttaaaggctggctgaagatggaacataagaacacatcagtgaaacacaccttctgtcagaaagctggacgaggcactggcccgggaagctggagtcccacagggaggtgtgagcaccagttggttgacccatgtccagaaacaggaggcctgggccacccaggttctcctgggaggtggacctcagaaagcgtctcttagaggtttccccaacagatgtacacagggaagcttggggatagcggggaaaaggagaagaaaatttaggaatggattaacaaagggtaaaatggaggattgggtaggggagtggaatggaaaaatagacaggaagacagagtccctggctctgtatgccagagcggggcatggttctatttgttgtgataaaatatgacctatggaagacactccatggttattttccaatacaaagatgttgagcatcttttcatatatttgttgaccatttatatatcatctttggagaaatgtctcttcaagtctgttgccctcccttttcttaaatcaggttacttctttttttgttgttgggtataggaattttggttgttgttgttgttgttattgttttgaaatggagtctcgctctgttgcccaggctggagtgcagtggcgcaatctcggtttactgcaacctccgcctcccagattcaagcgattctcctgccttagcctcccgagtagctgggatcacaggtgcctgctaccacgcctggctaattttttgtatttttagtagagacggagcttcaccatgttggccaggctggtctcgaactcctgaccttaggtgattcacccaccttggtctcccaaagtgctgggattacaggcgtgagccactgcgcctggccatagaaatgttttatgtattctggacattatgatatccagatatccttatatgatttgcaaatattttctcccattccatgggttgccctttcactctgcagattgtgtcctttgatgcatacaagttttatctatgtttacttttgttgctggtgagcactatgtattttaaatacatagtgtattttaaaatatccacattgcggccgggcgcggtggctcacgcctgtaatcccagcactttgggaggccgaggcgggcggatcacgaggtcaggagatcgagaccatcctggctaacacggtgaaaccccgtctctactaaaaatacaaaaaattagccgggcgtggtagcgggcgcctgtagtcccagctactcgggaggctgaggcaggagaatggcgtgaacccgggaggcggagcttgcagtgagccgagatcgcgccactgcactccagcctgggcgacagagcgagactccgtctcaaaaaaaaaaaaaaaaaaaaaaaaaaaaaaaaaaaaaaaaaatccacattgctatatatacatcagttttgcttttaatcataatgtgcatctatcatattttattcctctagttccatgttgtctcccacacccctcaactaacgtctgccacagggaatattctatatgtttttttatagaggtctacaaaaatccctctgccatttatacccgggagtagaatgtgtgggtgaaagggcatctactgagtcttgccagcttagtgcctgccatctcaatccatttggcatctttatattttgctggagaactgaggttgcgcctagtctctggccatttgcagggtacaggtatgtgaaatagaattgttggtgccagagactgttgaaaaacaaacgcctgttttctttcctgttccctaggttggacgagggagtgcttccaggagtggggctcctacatccacctggttattcccagtatgttcatggtgtgcactgagcagtggacctttgagatcggaaacttccttgcaggtttgtcagcagtccagctgaaagctgtcctcagcccggccagtcacatctccagagattcccaggaagctccagctttgcttctttgtcctgcctcatttcatcaggctcttgtggagcttttcaatataggtttaagccctcatcccatcattagcagactcaggttgggtggggttttggctctgctgcagtacccttcattttgtaagtgaggaaagggaagctgccggtcagaggtttgtcagaggtcaccaactgaaggaacaaaagccccaccccaggcctcatgaactagcttgtgcctcagctgacttttgccaggtatcaagccaaattgttttttaattttaattttaatttattttttgagacagagactcgctctgtcacccaggctggagtacagtggcgtgatctcggctcactgcaacctccgcctccctggttcaagcgactctcctggctcagcctcccaagtagctgagactacaggcgtgcactaccacgcctggctaattttcgtatttttggtagagatgggatttcaccgtgttggccaggctggtctgaaactcctgaccttgagtgatccacctgccttggcctcccaaggtgctgggattacaggcatgagccacaatgcctagcccaagccaaatttctaagagttgtatgtactcagggtgacggatttagccctgttttagccatggcctatgtttctgttggaactgtaataatttttgccatagatatttaccttagccatcttgttattagtaaagtaacagtcgatgcagagggtgacagtgacaacgttgccatttccatggacacttgaacacatcaacagtcccatcagctatctgtagagttctgcagccttctgcctcccctcccaccatgtgaccccatgtctctctacggagtgacttgcaactctaacagcctcacttttttatgctttttgggggtgggggtagggtctcagtctgtcacccaagctggagtgcagtggtgcaatcacagctcactacagcctcgacctcctgggctcaagtgatcctccggcctcagcctcctgagtagctgggactacaggagtgtgccaccacgcccaactaattttttttttttttttgtaaagatgggggtctcactatgttgcccaggctggtctcaaactcctgggctcaggtgatcctgccacctcagcctcccaaagtactaggattacaggtgggagccactgcacctggccattcttttttctaccttgaacctgatattttgtttcctggcggagtagggatttgtagaatgaggctgtgttaatctgagctgcctgagatcatggtcatggtaactgctcagggaaggatgtctgggcttctcagcacacgcagtgaattctgccaccaggttatgcttcttgggggcattcttgggttctcttaaaataagttctagtttcataaggaaaatgtttatatactttttgaaatgtgttgtgtgtgtgctgatgtttcaggactgattgatgtgatggagctcggcactcagggcatcatctgtgagctggcgtcagtggcctacatggtaagaacttgggtgagactcgggacgagacctggcaccttctctgcttaaacctgctgtgccactgtcattgcattcactcagcagatgtgcaccatgggaagggaggaaccaggcagcacaagtgagagaggacagtgcagtgtggacagcatggatgggggccagacacacggaggtgagtcctggccatgttgttccccaactgtgtgacctgggcttgttacttaacctttccaaactttagtttcctcatatacaaaatggggggaaaaaaaacctactttgcaggtgaagattgaatgagaatgcatgcatatgcaacactcaacacgacgcctgacacatacgttcacctgatgtggagttggtgctaggatgcagtggggtgtgagatggggtcacctcctgccctctgcagctcgtggccccatggggagacagggatgagccaagtacacagatgagtgagagcattgtaaatgtatgcgataggtaccattaagaagcaaaagcagggccaggtgcgatggctcatgcctgtaatcccagcactttgggaggctgaggagggcagatcacctgaggtcaggagttcaagaccagccggaccaacatggtgaaactccatctctactaaaaatacaaaaagtagctgggtgtggtgtgcatgcctgtaatcccagctactcaggagtctaggcaggagaattgcttgaacctgggaagcagaggttgcagtgagctgagattgtgccactgccctccagcctgggtgacaaaagcgaaactacgtctcaaaaaaaaaaaaaaagcaaaagtaggactgatatgcatgaaaacagagatgacacctttttggcttgggtagtcaggaagggtctttctgcattgctgtttaagctgagacttgaaggatgagaggagccagcttgggagcctgtgcacaggagccaactgctcagcctgggccaaggctctgcaatgggtccaagcacctggcgtggatgaggtgaagggttagtgagggtagaaggaggctggaggcagcacgcagggcctgtgggctccagaaggaaacagccattcttggtgccatgtagaagtgggcttagaggaaaacaggtgtgggtgtgagttgggagggcagaaggaggctgttggaatcgtccagatgaacaatcaggaggctgctggtgggggaggagagaagggggtggatcagttatgtgtagaggcagaatcgacaggtcatgatcagggtttggttgtggaatgcaaaacagtgaaggagaagggtcacagactgcagagtttctggcttgagcaactgtagcggtaatgcctgttgccttttgatgctttttgaatgtcccaacccagtgcagatatcccctttgttttgtttgtttcttgtttttgttttgttttgtttttaaagatcaactgaggccatctcagcagtgggattatgggccatttttgtttatacacacacacacacacacacacacacacacacacacacacacacatatatgcgtatatatactattattgactgtacaacaaaacctaatccatatgaatattgatccgtactagaaattcttaatattgcatagcgcatatattcgttcattggacatggcacatttcagtcaagaaatcccttgtcaacatggatatcctctgccagattttggtctcttaatctaccaacctccaataaatcatcatcccgctctggagtgctaccctcctcgctctgggcccataacacttgggggtgactatcctgaaactatacctggcatccggttcttacttcagggccataaaactaagatcacccacacattccccttaaataagacatcttgatggattaatgactatcaccctattaaccagtcatgggagcactgtcatgcttgggtatttctaactttgggggatgctatcactcaccattgcggaaggtctagtcccttccgaatccgctgtagatgaacttggattgattcctgccaaatcaattgtagaagctgagcttatattgaatattccaggctggcacaataaccacaaggtattaattaattcatgcttgaaagacataacaattaatcaataggcacgtatgctcatgcatgtccactcactttcaagaactatttccgattaaatccgcaaccccccatctctgactttaccatcaacctaggtaagtgtaccctcaccaaacccccaaaacaagagactaaaatgcaacccagtcagagcccagaaatcatgttttaaccatgaataccccaacagctgtcactcgattgatgtcattttcctaaaaatcttaagaccctcctactaaattaagcctccattttatataataaatacaataactaaatttccaccctaatactgatataacaccttgggcatacccctctgaaagtgctaccccatatgccataccctaaatcaattatatccaaattatgagtagtcctctcagccaaacctctgccaattcaactttaaagaccctgacttcccagaactgtaaacgactatttatacttacttctttccttctcatattttaatcttacacttaagtatttatgcagttaatgtagcttaattattcaaagcaagacactgaaaatgtctagatgggtctgcacatccccataaacagatatgtttggtcctggcctttctattagcttttagtaagattacacacgcaggcacccccgccccagtgaaaatgccctctagatcacccagatcaaaaggaacaggtatcaagcatgcacaaatgcagctcaaaacactttgctcagccacaccgccaggggaaacagcagtgataaactgttagtaataaacgaaagtttaaggtatactgatatctagggttggtcaatttcatgccagccatcgtggccataacattaacccaagttaatagaactcggcgtaaagagtgtttaaggtctggcctcaataaagctaaactccatctaagttgtaaaaaacctccagctgaaataaaatatactatgaaagtggctttaataccctgaagacacaatagttaagacccacactgggattagataacccactatgcttagccctaaactctaatagttacattaacaaaaccattcgccagagtactacaagcaacagcttaaaactcaaaggacttggcagtgctttatatccctctagaggagcctgttctataatcgataaaccctgatatacctcaccacctcttgcccccagcctgtatagtgccatcttcagcaaaccctaaaaaggttgtagagtaagcacaagtatacacataaaaacattaggtcaaggtgtagctcatgaggtggcaagaaatgggctacattttctatactcagaaaatctcacgacaatctttatgacatctaagggctcaaggaggatttggcagtaaaccaagagcagagtgcttggttgaataaggccatgaagcatgcacacaccgcccatcaccctcctcaaatattattctagaaattactattactaaaaactctgtacgcacatatagaggagataagttgtaacatgttaagcatactggacagtgtgcttggacaaaccaaagtgtagcttaacccaaagcatccggctttcatccggaaaatttcatcacgacctgatcactttgagccaactctagccccaaacctcactaaaaacattatcgaactatcttaatcaaaccatttaccttagacaaaagtatagataatagaaatttttaccctggtgtgatagacatagtaccataagggaaagatgaaagaactgaatcaagcattaaaaagcaaagacaaacccttataccttctgcataactagaaataactttacacagagaaccacagccaagtcccccaaaaccagatgagctacccaagaacagctgaaagagcacacccacctatgtggcaaaatagggggaagattcatgagtagcagcgataagcctacggagcctggtgatagctggttgtccaagacagaatcttagttcaactttaaacttactcacagaactacttaatctccctataagtttaactgttaattgccaggtgcggtggctcatgcctgtaatcccagcactttgggaggccgaggcgggcggatcgtgaggtcaggaaatcgagaccatcctggctaacatggcgaaaccccaactctactaaaaatacaaaaaaaaaaaaaaaaaattagctgggcgtggtggcgggcacctgtagtcccagctactcaggaagctaaggcaggagaatggcgcaaacccgggaggcggagcttgcagtgagctgagattgtgccactgcactccagcctgggtgacagagcaagactccatctcaaaaaaaaaacaaaaaaagtttaactgttaatctaaagagggatagctctttagaccataggaaacagccttcctacagagagtaaaaaatattaccaccatagttggcccaaaagcagccaccaattaagaaagcattcaagctcaacatctaactatcttaaattctaatcattctactgaactcctaacatcacactggactaatctattacttaatagaagcaataatgttaatgtaagtaacatgaagatattctccattgcataagcttatataagatcggaataacccactgaaagcctaatattaataagtgatataataagcatcctattatttataccgttaatccaacacaggtatgctctaaggaaagattacaaaaagtaaaaggaactcagcaaatcttatcctgcctgtttaccaaaaacatcacctctagcattaccagtattagaggcactgcctgcccagtgacatatgttcaacggccgcagtatcctgaccatgtaaggtagcataatcacttgttccctaaatagggacttgtatgaatggccacgcgagggttcagctgtctcttacttctttttttttttttttgagacggagtctcactctgttgcccaggctggagtgcagtggcgtgatctcagctcactgcaagctccgcctcccaggttcacaccattctgcctcagcctcccgagtagctgggactacaggtgcccgccaccacacccagctaattttttttttttttgtatttttagtagagatggggtttcaccatgttagccaggatggtctcgatctcctgacctcatgatccgcctgcctcggcctcccaaagtgctgggattacaggcatgagccaccgtgcccggccatctcttacttttaatcagtgaaattgacgtatccatgaagaggcggatataagacgagaagaccctatggagctttaatttattaatgcaaataaaaactcaaaaaaaaaaaaaaaagcctacaggccctagcctactatccctgcattaaaaattttggttggggtgacctcagagcataatccaacctccgaacaacctaaactaagactgcactagtgtaagtgagttaacacacactgacccaataatttgatcaacggaataagttaccctagggataacagcacaatcctattctagagttcatatcgagaatagggtttacgacgtcgatgttggatcaggacatcctaatggtgcagccgctattaagggttcgtttgttcaatgattagaatcctacatgatctgagttcagatcggagtaatccaggtcggtttctatctatttaacatttttcctagtatgaaaggacaagagaaatagggcccacttcaaaagcgctcttgccccatagatgatgctatctcagtcaaacaaattatcacacacccaacccaagaacagggtttgttaagatggcagagcccagcaattgcataaaacttaaaactttatttatttatttatttatttatttatttatttatttatttatttttgagacagagtctcactctgtagcccaggctggagtgcagtggcgcaatcttggctcactgcaagctccacctcctgagttcacaccattctcctgcctcagcctcccaagtagctgggactacaggcacccaccaccatgcctggctaatttttcgatattttttagtggagatggggtttcaccatgttttgccaggatgatctcgatctcctgacctcgtgatccacccacctcggcctcccaaagtgctgggattacaggcatgagccactgcgcccggccaacttaaaacttataatcagaggttcaactcctcttcttaacagtatgcctataattaaccttctcctactcatcattcctactctaatcactatagcattccttacactcactgaacggaaaatcttaggctatatacaactacgcaaaggacctgacattgtaggtccctatggactgcttcaaccattcactgatgcagtaaaacttcaccaaagaacccttatggccctcaacatctactattaccctttatattattgctccaaccctggccctttctatcattgtcctcttgtgagctcccctccctataccagatcctctaattaattttaatataggcctcctatttatactagccacatcaagcctagccgtctactctattctatgatcaggatgagcatctaattcaaattatgcactaatcggcgcattacgagctgtggcccaggcaatttcatatgaggtcaccctagccatcatcctgctgttaattctactgataagtggctcatttaacttatatgcactcatcacaacacaagaattcctctgactgctcctaccatcatgccgcctagtcataatataatttatctccccactagcagaaactaaccgagccccttttgacctaacagaaggagagtcagagttagtctcgggcttcaacattgaatatgccacaggttcatttgccctcttctttatggcagaatacatgaatattatcttaataagtgccctaactactactattttcctaggagcactacacactatatattcaccagaactctataccacaaatttcattatcaagaccctcgttctaaccgccctgattttatgaattcgaacagcatacccctgactgtgctacaaccaactcatatatctcctatgaaaaaacttcctaccacttaaactagcattctgcatatgttatatggcctgtcctaatttccagcattccacctcaaacataggaaatatgtctgacaaaagaattactttgatagagtaaataatagaggttaaaatcctcttatttctagaactataggaattgaacctacccctgataatccaaaattctccatgccacctattacaccacatcctaaagtaaggtcagctaaataagctatcgggcccataccccaaaaatgttggtcatacccttcccatactaattaatccattagcttggccttactattttcacaggaactcttatcacaatgctgggctcacactgatttctcatctgaacaggcctagaaataaacatactagcttttataccaatcttaatttaaaaaaatagctaggtacggcgactcacacctgtaatcccagcactttgggaggctgaggcgggcggatcacgaggtcaggagatcgagaccatcctggctaacatggtgaaaccccgtctctactaaaaatacaaaaaattagcccagtgtggtggcaggtgcctgtagttccagctactcgggaggcagaggcaggacaattgcttgaacccgggaggcggagcttgcagtgagccgagattgcgccactgcactccagcctgggcgacagagcgagactccatctcaataaataaataaataaataaatagataaatccccactctacagaagcagccaccaaatacctccttacacaagcaaccacatctataattctcatgataggtatcctttccaataacctgtcctctggacaatgaacaataataaacactagtaatcaattttcatccttaataataacagtcctagtaataaaactaggaatatccccctttcacttgtgggtcccaacagtaacccaaggaacctctctaatgtctggcatacttctccccacatgacaaaaactagcgcctatcttgattatgtttcaaattttcccaacaataaactcgaacatcctcctatcataatttttttttttttttaagtcagagttttgcccttgtcgcccaggctggagtgcaatggcacgatcttggctcactgcaacctccacctcccaggttcaaacgattctcctgcttcagcctcctgggtagctgggactacaggtgtctgccaccacgcctggctaatttttgtatttttagtagagacggggtttcaccatcttggccaggctggtcttgaactcctgaacttgtgatccaccctcctcagtctcccaaagtgctgggattacaggcgtgagccaccacgcccagcctatctatcacaatcttatccattattgtgggcggttgagaacttaaacacaactgcgtaaaatcctagcctactcctcaattactcacataggtttaataatagcagtactaatttatgaccccaaaattaccattctaaacctgattatttactttattttaacaactactgcatttctagcactcaacctgagtataagcactgcagtcctgtcactatctcatgcctgaaacaaattaacatgattaacacctataattccactaattctactatccctaggaggtttaccctcattaacaggatttttgcctaaatgagccatcattcaagaatttacaaaaaacaatagtcttaatatcctgatcattatagctaccataaccctactcaacctgtacgtttacatatgcctaatttattccatctcagtgacaatattctccacatctaataacatgaaaataaaatgacaatttgaaaacacaaaacccatactactcctccccccagttatcatttcttctaccctcctcttacccatctctccattaacactaactataacttagaaatttaggttaaataagactaagggccttcaaagtccttagtaagtaaactatacttaatttctgtaacagacctaaggactgcaagactctcttctgcatcattgaacgcaaatcaaccactttaatgaagctaagccctggctaggctggtggaattcaaacccacgaaaatttagctaacatctaaacaccctaatcaattggcttcaatctacttctcccactgttgcggggagaaaggcgggagaagccctggcaggattgaagctgctcctttgaatttgcaattcaacatgagaaatcacttcagggctggtaaaaagaggtcttgacctctgtctttagatttacagtctcatgcttactcagccattttacctttttcccacttatgttcatcagtcgttgattgttttcaactaaccacaaagatattggaacactatacctgctattcagcgcatgagtggggatagtgggcaccaccttaagccttctaattcgagcagaattaggccaaccaggaacttggcttggagatgatcagatctacagtgttattgttaccgcccacgcagtcatcatcatattctttatggtaataccaatcataattggaggtttcggcaactggctagtccctctaataattggtgcacccgatatgacatttccctggataaataatatgagcttctgagttctgcccgtctctttcctactcttacttgcatcctcaacagtagaagccggcgctggaacccgctgaacagttcatccccctttagcaggaaactgaacacatgcaggagcctctgtagatttaaccatcttctcattccacttggcaggtgtttcttctgttttaggggccattaatagtagatgtacgaaagttgattaaggaatttttagtatgtacttatatgtatgtggactacatacatataatagccagccaccatgcctggctaatttttttttttttttgtagagatggggtttctccatgttgcccaggctggtctcgaactcctgagctcaagtgatcctcccacttcagcctcccaaagtgctgggattacaggcatgagccactgcactcggcttccttaactttttttttttttttttttttgagatagagtcttgctctgtcgcccaggctggagtgtagtggtgtgatttggctcactgcagcctctgcctcctgggctcaaggaattcttctgcttcagcctcccaagtagctaggatcacaggcgcctgccaccaggcccagctaatttttgtatatttagtagagacagggttttgccatgttggctagactggtctcaaactcctgacctcagatgatccgcctgcctcggcttcccaaagtgctgggattaaaggcatgagccactgcgccttgcctccttaatctttttttttttttgagacggagtttcactcttgttgctcaggctggagtgcaatggtgcaatatcagctcacctcaacctctacctcccgggttcaagcaattctcctgcctcagcctcccgagtatctgggattacaggcataccccaccacacccggctaattctgtatttttagtagagttgggttttctccatgttggtcaagctggtcttgaactcccgacttctggtgatctgcccacctcagcctcccaaagtgctgggattacaggtgtgagccactgtgcctggactcctccttaatcatttttaagtgtacagttcagtagtgttaactgtattcacactgttgtgcaaccagtctccagaacttttcatcttgcaaaactgaaatcatgtactcattaaacaactcttatcctccttccccagaccctggtaaccaccttctactttgtttctcgtcgcaggcccttttttgttagagacagtgaggcaacaattcttcattattccctaatactaacaccaacaccactaacagcaaaacaagccctgttagtggtgagcttacagtaaaaattataaaatataaagaagtaatccaccatgaacaagagttaacacatacaactaacaggaaaattaaagttaagaatttgcaataatggtatcataatcagacagagaatagaaaattatgtttaaaatcattagacataaaggccgggcacgtggctcacgcctgtaatcccagcactttgggaggctgaggtgggcggaccacctgaggtcaggagttcgagaccagcctgatcaatatgatgaaaccccgtctctactaaaaatacaaaaattagccaggcttggtggcatgcgcctgtaatcccagctacttgggaggctgagacaggagaatcgcttgaacccgggaggtggaggttgcagcgagctgagattgtgccattgcattccagcctgggcaacaaaagcaaaactcatctcaaaaaagaaaaaaaatcattagacataaaagaaggaattgaaaccaaaagaacaatattggaaaaaggaccacagggaacttccagaagtaaaaaatatatccattgacatttaatacttgatagactaaactgcagattagttacaactgaaagattaaataatgaacttgaagatagatttgtggaaattccccagaataaaagatatgtaaagagatggaatgtatgcaagatctaagtgggttttcttgtttttttgagacggagtttcactctgtcgcccaggctggagtgcagtggcgcgatctcggctcactacaacttctgcctcccaggattaagcaattctcctgcctcagcctcctgagtagctggaattacaggcgcctgccaccattcccggctaatttttgtatttttagtagagacaaagtttcaccatgttggccaggctggtctcgacctcctgacctcaggtgatctgcctgcctcagcctcccaaagtgctgggactacaggcgtgagccactgcgccgggcctaggtcattatttatctgatagaaattctaaggaaaagagtaggagactggtggagatgtagtactcagacatttgacagaagacacttgaagtaagacatgaatcttaatattcaaaaatctaatgagcattgtactggagattctaccctgggtgattagacaagaaaaagaaagaaaaggcatccagcttgtaagggaagaagtaaaactatcctatttgagtgtgacatgatcgttcatttataaaaccctaaagaatccatacacacacaaaactaaaactactagagctaataaatgagttcagcagagttgtaagatacaagatcaattcataaaaatcagttgaatttctatccactagcaatagacaatctgaaaatgaaattaagaaaacaactccattcacaaaagtatcaaaaagaataaaatactttgggaggccgaggcaggcggatcacaaggtcagtagatcgagaccatcctggctaacatggtgaaaccccgtctctactaaaaatacaaaaaattagctgggcatggtggcaggtgcctgtagtcccagctactcgggaggctgaggcaggagaatggcgtgaacccgggaggcagagcttgcagtgagctgagatggcgccactgcactccagcctgggagacagagcgagactccgtctcaaacaaacaaacaaacaaaaatgacaagaataacaaagaagaataaaatacttaggaataaattcaaccaaaggagtgcaagacttgtcagtgttaaaagacattaaaaatgtaaataaagatttcccatgttcatagactggaagccttaaaattgttaaatacaccctaagttgatctacagattcagggcaagccctatcaaactttaaataggcccccttcttgcagattgaaaaacacatcctaaaactcatggagatgcaagggacccaggatagtcagaacaatcttgtgaaagaagaaagttggaggattcacacaccaccaacaacaataaaaaccagaagacagtgaaataatatcatcagaatgctaagagaatagtgttattccttattcagctatactattgttctcaaaagagggcaaattaaaagacattttccagcaaatactgagaggcatcaccatttatttatagagcattcatgaaaaaaaaaaacacactgatgtccaaaacatggcaacgaaattggtaaatatggatatattgaaactcactttgaatttaaattttaaaaaataataggctaattcatacagtacaaaaataaagtagaaataaaatatgtacagcaataaacggtaagattgggagaagattctgttagttaaagccatctagatattatcagggaagagggtaggatatagtgattgacaaagtttttaagtcaggtatgcatgttgctattttaagggaataaccaaaagggaagaaatagaatatataatttattttattttattttatttatttttttgagacggagtctcgctctttcgcccaagctggagtgcagtggcacgatctcagctcactgcaagctctgcctcctgggttcacgccattctcctgcctcagcctcccgagtagctgggactacaggcacccaccaccacgcccggctaattttgtttttgtattttttagtagagacggggtttcactgtgttagccaggatggtctcgatctcctgaccttgtgatctgcccgcctcggccacccaaagtgctgggattccaggcgtgagccactgcacccggccgtaaaactcgttttatagcaaatagtacaatgaacaaattgacatatataaaaaggaacaaacgatacatgtcataacatgtgaatctcaaacttttttttttttttgtgacggagtctcgctctgtcctccaggctagagtgcagtggcccgatctcggctcactgcaagctccgcctcccgggttcccgccattctcctgccttagcctcccgagtagctgggactacaggcacctgccaccatgcccagctaattttttgtatttttagtagagacggggtttcaccatgttagccaggatggtctcgatctcctgacctcgtgatccgcccgcctcggcctcccaaagtgctgggattacaggcgtgagccaccgcgcccggcctagaatatataatttataaaccagtagaaatcaaaaggaaattaaaaaaatctaacataaagcagtgaaaatgaagataaaaagtaaaaagaaggcattataataatacaaaataagatagtagaattaaatctcaaatatgtataatcacactaaaggaaaatacacaaaatttcccaaagatagactctcaaatctcccctccctcacttccaatctctttgcagtgcttttttgtctcagccgtgtcctgcttttttacttaacattaccacacaaacatgttttttatgtttataaaggcacttcctgaaaataatgttaaaatccgattgtctctgtataatcagtaactgtcacactgttcacctaattacttcactgtcattggacttttcatttgtctagtttttcactatcccctataattgattccctgaatatctttacacaaaatttgatccttgagactagaatcccaaatcagaaacaagtgtttcaaaaaatctttgctagctcagtatatgaaaaatgggtacttaatttcaattttttaaattagtgaggttgactatatttaactagtttttcttttaatcatcttttatctgtttatgtctcttgcctgtttatcagtttggggtttatttttcttttgaatttatatgagttctttataactagaagattattagttttctatcagttgtgtctgtgacgaatttttcctttttattttaaaattttatgtattcttaaaaatgttttattataaaagcaaattatattaagcaacacataacacattctgaacacatagcatagttcagaagttaacacaactgaaagtgagcacttcttctatttaggctagttccccagagctgtcccacttctttttttttttttttttgagacggagtcacccaggctggagtgtagtggcctgatctcggctcactgcaacctccgcctcctgggttcaagcaattttcctgcctcagcttcccgagcatctgggactacaggcatgtgccaccaggcctggctaattttttgtatttttagtagagacaggggtttcaccatgttagccaggatggtctcgatctcctgacctcatgatcggcctcccaaagtgctgggattacaggcatgagccactgtgcccggccaatctgtcccacttcctaaccatttctggctatagctctgatgattgtcgccagagctttatccctacacttcttatcacccttacccggtaacggttggcttcctgttggaaagatgagaaatcagctcactttacgtgccatctccctcttccttgtggtttttgtttttctgtttatagttctcttagtggtcaaattgtttataaccttaaataataagcatagacctctatttcttggtccaacaactttatagaccctgtgacctgacccctaagttgtaagatgaggaacatggggtccttttgtttctttccgtctctcttcccatttgcctcccaaattccagaattccatatgctgcttaatagccacccacatgccatgagccaggcactatgcgaaacacttcacaaatgggactcacaagctcctcattgcaatgccatgtgagggatttactgttctttcccctgcatcacagatgaggaaactaaggcccagagagtatcattcgtccaagttcaaggaagtaactggctaggatttgagcccagggacttggctccagaggtcatggtcatggtcttaatcacagctacctctcagctatatcactgtttttattttgtgaagcttacgacatttgaattgtattatctaatggttatcatgtctttcatgtgttaggggttgtctgaaaaaaataaacattcataatattatgatttttgtaaatatgattatttgcagatccaaatgtggtcttgcatcagacgagaaggaaatgcaaatccagtagccaccaacactaccacttgaaagaggcttttacaagtgaaagatgaaatgcattattttttcttgcttttgtcatttggtcaaaatcatgtcatattttgtttcatatttaggccatgacttttcttgtgcagctcatttgttttttctggcatttctaacagcctttatttcttattgatggagcagcatggcccctcatctcgttactaagatgatccagtgtgtaaacatactgttaagtatgagtgcatttttttcttgaatgcctcagggccctttgattccttgttttaatttgtatccaggctgggcgcggtggctcatgcctgtaatcccagcactttgggaggccaaggcagccagatcacctgaggtcaggagttcgagaccagcctggccaacatggcaaaacctcatctctactaaaaatagctgggagtggtggcaggctcctgtagtcccacctactcaggaggctgaagcaggagagtcactcgaacctgggaggcggaggttgcagtgagctgaaatcacaccactgcactccagcctgggtgacggaagaagactcttgtctcaaaaaaaaaaaaaaaggaataattaatttgtatccattgatttctagacttttttctagcttgctgcacagctgtcattccagaatttctctcattgtcctcctgaattaagcctacaatttctttgatcccatttcttcctctttcttagatttctttaattttttttcttctgatctagcagcagccaaatgaaaatttaaaaaaatttgttctggagtacttagtcaaaaacttgttctaagattatatggaaagtaaatcatatgccatgcatattcgagagtctttattttcctcttatacttgtttaataatttggctgagtataggattgtaggttcaaaataacttccctctgaattttgaggacattgctgtgtctcagtctggtattcagagttactgatgtgaagtctgctcagaatctgtttcttgttcctttgtaggcagcatgatttttctctttgaaagttttaacgtttatttctttatctttatagttctgaaatctcacaagagtgcatttctctgaggatactttttaacttctgcttagcacttggtataccctttcagtctgaagacctgtgtttttcttcaactctgggaaatttaaaaaatattctttccctcttttctgtaaatttttttctgttctttctttttaaatttcttattaggtggaggttgaccttgggaattaatcttcttggctttggcttttttttttctattaaaaaatatctctttgtctttttgtttatcttctttgctgcttttttttttagtttcatttttaatttctaagaacatcttttttttgtcttatagtctcttttatgggaacctgttcttgttttatgctgcattaccttttaaatatccctgtggatgctaaatcggaactttaaacgttcttctgtgttccttgagtcatctattttctctgagatcagttgaccttttacttatctttatctgttttggggatgtgtgcttcagtcttcctcaaagctctggtgatcttactagtctgtttatacttaggaatgaatgagtacattgatttatcaaacaaatggccggcatagctttcctctcctattatttggagatttttctccaacaggcctctccccaaaatgggaaggaccagtggggaactcggtaccaaggtggtacctgtccagtgacatcttcattttaggacttatgggtgaggattaggcagtaggcagcctgacctcctgccccaccttatccccatgtcccacctatcccccaaaacaaaagaagaagggcctgactcacgccacggaggaagctccacacttggcttttctgtgtcagcccagcttcttgtgtgcagtaaggctaaggacgggcaggtcgcggggcttgggtgtcctgtcccagccctgtggcgcatctccctgactgctcttcttcacagcctcggtggggggaagcagggcgtcagtgctcctggagctctactgggaagacggagtgtgaggcagcattctgttcatgttctgtgctgtggcttcctgcgtttctgcccttggatcatggctgtggagcctgctttccctcttccagaagctgaccggctctcattctcagtgttgttaatgaatttattttctattaagcatggagatttattttccattaacagtgttttgggagggaagggagttaggcatgtgattcattcattttgaactggaagccagttatgtgtactttaggcatgcaaatcttaagagatgtttatatactcatactcaggtctgtttttttttttaagttcttttttttttttttttttttgagatggagtctcactctgtagcccaagctggagtgcagtggcacaatcttcgctcactgaaacttccgccttccgagctcaagcgattctcatgcctcagcctcccgagtagctgggactacaggcgcgtgccaccatgcgtggctagttttttgtattttagtagagacagggtttcaccatgttgcccagggtggtctcgaactcctgagctcaggcgatctgtcagccttggcaccccaaagtgctagaattacaggcatgagccaccgcgcctggcctcaagttcttaatcttaacaatttaatatatatttttatcaactgaacttaggctagttttcaaaacagtaatgaattagaaggcttttgggaggatgctgtttctagtaggaatgagaagttagagctgatgtacgagtgattaaaagtgaacttgagagcccaaagctaagttgtctgtacaacccacgttaccctcgcagcccctgggggcagcattgtattgcaggatcatgataggggtcaagaaggtggccccaaaggttgagtggtggtctatttaagaagcaaataagcttatagctttagattttcataatcaatgattaaaattaagcctttgcatttgaaggggcctctttcaatttaccggataatcagacatatggaatgtttcacccatcccaccaaaaacgaggtattgtcgtggagtcagatttcatcaatgtctggggttcctacagtgtgccaggcgcggttctaaatgctttttcacatgggtcatttaatttttacaaattatttgtatactaacgtttatactaagttaaatcttactttgtataatgtagctaagttgaattgtcttgatagtgtgtgtgtagccaataaagggggtgtgttgccctcaaatccagcttcattacgaggttctgctgtgatgaatgtggtacagggagccgtcagggcaactgtcatgcttccttacctgcaaagaaatcggatgtcacatggctaagcaatttgtccacagtcacacagctaggatgtaagagagccagttctagaactcagctctccgggtctgtcctgtttccatttagttagacgctagtgcactaatactccaatgttcaggctttacgactgtgatttatgcttcttaattctcaggtacccctgggccttggagttgcagccagcatccgagtgggcaatgctctgggggaagggaatgtagaggaggcttggtgctcctgcaccacagttctcctgtgtgctggtgagtcaagcattctactccctggcatctgtgctgaacttagtgtgctaagttaaaatctatgtatcagaatttctctaggaattgaatcatatatatatattcaactaaaacatctattctttatgctctttcaaatttacaaagttaaataaagcttttaattatgattttctgttaatgataaaccaactaaataatgttacacttggttctactgaaataattctaaagaccaggttcaagcaattctcttgcctcagtctcccaagtagctgggattacaggcacgtgccaccacacccagctaatttttgcatttttagtagagatggggtttcaccatgttggccaggctggtcttgaactcctgacctcaggtgatctgcctgcctcggcctcccaaagtgctgagattatagatgtgagccaccacgcctggcccagttttattattttcaagtgtgctttcctagtgtcatctgacctcactgattttagaccaatgcctaaacgtattcttataaaatctcaggaccaaggaggtgatcagatggagtaatagggactggatttacctttctgctttaaacaactaaaaactggccaacacatacatataatatgtatatatatgtatgtatatataatatataatatgtatatattatgtatgtatatataatatataatatgtatatattatgtatgtatatataatatataatatgtatatattatatatgtatgtatatatgtataaatgtatatgtatatatgtacattatatatatatatattaaaatatatatatatattttaaaatagttttcaatcccttgaggccaggagtttgagaccagcatgggcaacatagcaagacccatctctacaaaaactacaaaaattgcctagatgtggtggcacatgcttgtagtcccagctctgtgggaggatcacctaagcccaggaagttggggctgcagtgagccatgattatgctactgcactctagcctgggtgacagagcaaggccttatcttaaaaaagaaaaaagttttcagacattggacaacaggcagcccaaagaggggaaaaaaatgagagaacactatgattacccagtgtactaggggagagtttccaggccatagcacaggaagagggaaagccctgctatctctgtgagatgaagaaatggagttgggagttttgggaggccatgtgacttgagttcacaaggcaggggaccagagaggagagagtttgagagggagtgctttcaagatcttggctgggcacagtggctcacgcctgtaatcccagcactttgggaggctgaggtgggtggatcaactgaggtcaggagtttgagaccagcctggccaatatggtgaaaccctatctctactaaaaatacaaaattagccaggcatagtggcacacacctgtaatgccagctacttgggaggctgaggcaggagaattgcttgaacccaggaggcagaggttgcagtgagctgagatcacaccactgcactccagcctgggccacaaactgagactccatctcaaaaaaaaaaaaaaatccacagaggggctctctcaagtctagctgactaccaaactggatgtgcatgtgaggatgctactggaagccagcgggacacacctgaaaggagcagacaaaacaatccctggagttcataagggctgggaagagtttgtgttcccaacatccagaatgaaacaacctcgtaatacataagacagctggtggagttctcaggagggttttgcctgggtagtagaggaatattagccctaaaaataaagagtgttctggtcctgcttaacaaagcttaaaagcaaacctcaagaaggtcaaactgcttctaggaagcaactgcatcacagaacttaactgtatcaaagctcaagagcatttaaaatagtacaagaatatgtagtaaccaacaaagtaaaaatcacaatgtctgccaattaataattaccaggcatacaaagaaataataaactaaaatccataataaagagaaacatcaatcaatagaaactgacccagaaatgaacagataaaattactactcaggaatactaaaatggtttctataattttgtttaatctttaagaaaatagagaataacatgagcatgctaaagtgagatatcaaatttatgaaaagaaaagcaaattgaattgcaagagatgaaacaaaaaaatctgaggtggaaatacattggttgacattaacagcagattagacactgtagaagaaaagattagtgaatttaaagatacagcaatggtaaatatcctaaataaaatgtagagagaaaaaagactgaaaaaaatgaaaatgagcaagttgtaagtggcctaaaagcacataatcgtacgtagttcccaaagcggaggagagggaagaggggcaggatactttttttttaaagaaataatggcaaaaaactttccacatttgataaaatcttcagattaaaggtctaaaagggtatttatttgatgtaatcactgatctgaccttgggattcctctagaacatcctggccaagctgtcgtttatacttaattaactcactgatgaggaacttgctacctcccaatgcagcttgattctcagaacacttttcttttgaactgaaacctacctttcctacccataactttcacccactgatactagctgttgggcttatgattctgtaggagagtctgtccatttttcagttactgccctatgggtgtttttatgatggctcatgctccacaggatcttcatggtaaacatttgtaattccttcagtcatttctcatggaatgtggttttgagtctctaccatcttcatcttgaattaacagaagcctgaaggcagtgtccatagtacaaacagcaccatttagagaagaaccatttccattagagcagaacccgttagacttctagggaagtactaagtttttggtggctacaccacatgacctgccaatgtgccactgaccagccacagcatcaccacccttcctttgtgtggttgtcctcctgagcccaagtgcagaatcctacatttggacccattaattgtttttttcttattttctagtcatcttgacatttttggtgtctaatttttccagtgacagtatgtcctatcctttccagctagtggcacctgtacatgtgatatacacttttagatcttcatttcctcctcttttatgtaaaaccctagcaccttcatacagtctttccaccctcaaatcttaccagcatcctgtgtgaactcagcatccatatagatgaagacattcaatgccccagcccctcacctcaactccccagtcctctctccagtaactttctcctgccctaccttgggcacacactccgtgatcatattttgggctttttcattgcatataactgttccaacttcagccctttaactggccacatccctaatccttccagcatacttttatagctatgtctacttaagaggtttcttcaaccacttgggcctcccagtcagttgacaactctttctcaatctaccacattcctgcctttacttccttccttatgtagcttagtcagtatggttcatcattttagtaactcttttgccagtaacctgaattcttttgacccttctaaatgacagaactccatcctggaggaacccagttgcacattttctgtactaatagccaatcacttcatattggttacactagaaacttatgaccattaaccataattagaccctcagcaccctgccctacctttgtttagtcatctcaccgtccatctctgcaacccatgttaaaccttctctactcttttaaaaccactggcccctccctaccaccttccaccatcactgtcagcaaatgaccttgcctcctcaagttcatcctacttggtgcttgttgggcttcttggatatgtagattcatgtctttcatcaaatttgggaaagttttcagttattctttcttcaaatatttttatgtttttttctttctctcctcacctctgagacttccattatttatatgctgatatacttgattgtgttctctaggtccctatatcagtgttcacttttcttaccttttttttctgttccttagactaatctcaattatcctatctttaagtttgctgattctttcttttgccggctcaaatctgctcttgagccctctagtgaatttttcacttcagttgtggtacttttcaactccatagtttttatttggttctcttggaaaataatttatatatctgtattgatagcatctatttggtgagacaatattctcatacttcattagatgtagttttatctctttcaacatatttaaaatagctgaattaaagtcttttttttttttgactgggtgcaggagctcatgcctatggttccagcactttgggaggccaaggtgaaatcacttgaggccaggagtttgagaccagcctgagcaacatagcaagaccctgtctctataaaaattttaaattaaattaaaaataaaactaaaaattagccaggcatggtggcatgtgcctgtagtcccagctactcaggaggctgaggcaggaggatttcctgagttcaggagttcaaagctgcagtgagccaggatagtgccactgcattccagcctgagtgacagagcgagaccctgtctctcttaaaaaaaaagtcttttttgataagtccaatgtttgggcttcttcagagagaattcttattgattgctttttaccctgtgtatgggctgtatctttttgtttctttgcatgactcatagttttttgttgaaaactggacattttaaatattacagtgccactgttctagaagtcagattgtctttttctttaggggcttttgctgttgctgcttgtttgcttagtgatttttatggactaattctgtaaagtctatattatttgccaaatatagccactaaagtccctgttctgttagcttaatgtcagctaattattggagaaatattttctcaaatgcttagaatcccaaatatctcccattctttgccaagggactctctgtgcattttgaggaacaccttcaacactcagtgaggcagtttacaactttgttttttgtttttattttgagatggagtctcactctgtctcccaggctagaagtgcagtggcactatctcagctcactgtaacctccacctcccaggtttaagcaactctcctgcctcagcctcccaagtagctgggactataggcatgtgccaccctgcccagctaatttttgtatttttagtagagacggagtttcaccattttggccaggctggtctcgaactcctgacctcacgtgatccgcccgcctcggcctcccaaagtgctgggattacaggcatgagccaccatgtccagccacaacttggttttaaacttcacttcctgtttgtgcagagtctcaagttcggccagaagtgagtgcttaggccttaatgggtcttccttgagcaggggcacagtcttaagcatgcatatggccttctagattccccagaatatgtcagaactttgcaaagcccctcagacatttcattccccagccattcctactaagctttttggtgagtttattgtgtatcccttgtatcaggcagcagcagctaaaacatttgcccgtatacgttttcaacaaacatccctcaacatcaactttagcactgggcaggtttgaatcaggtgaaataaagttagcctttcaagtggggtcttctagggaaccaccagacagatgatctgtctgtgaaataataactattccttgggaatagggctttcaaagagttcaacccattcttcctcctcaagtcctggaactgttatttttcaaggttactgctgagctaggagcaacaggatgatattagggtaagttaaaataccacaatgcttactgttcttaccaagattcagccacctttcttaaataaatgctcccaattccctttagtgaatttctgaaaatctgggaaaaaaattgtatttttttaaattaaaaaaaatatttttaagagacagggtctcgctctgtcaccaaggttggagtgcagtggtgcagtcacagctcactgcagcctcaagctcctgggctcaagtgatcctactgcttcagcctcccaagtagctggaactacaggtgcttgcccctgtgtgcagctagttaatttaaaaaaaaattttttttgtagagatagtgtctcactatgttgcccagtctggtttcaaactcccggactcaagtgaccctcctgccttggcctcccaaagcactgggattacaggtgtgagcaaccacagtcagccatgaaaaaattgattctgacaatttttgccaatttgtgtttcctgtgaatgggccatacttcctgtctctgtatgctctgtaattttgtgttgagaactggacattgtgagtattgttatatgaaaacactggaaatcagattttcatctctctccaggcattgttgttcttgtttgttggggctatttgtctatttgtttagtaatttttccaaagtggtttttacaaagacagaatgatctggcagggatttccttaaatgcctttatctaacaagaaagttaagctggcttttttgacaggcactgcctgtgaagccacttcatcccaaagggcctctatgccagctcctcagtggaacctccagatagatcgaaacacacaactttaatttttagaggataaggtttttattgcccagtttggcactagtaagccacactaggaatgcaggcagccatccctgcagctgcctgccgcggaactggaagacgggaaaaggtagccactatgtgaaatgcaattcacccatgatcaccaggccctttcttcaggcattccccttgttgctcactgcgagtttctcactagcctccagagtgccaaaatcattgactgtgacatctctcgccatcagtctcacaagagactgattcttgagcttcctactccactgttgttcatgatgtcacctggatagaggcttctcatgctgatttggctctcgttcttttgtagaacaaattttttttttctggaaatctttcagatattatttttgtctctgctgggtgtgcttaggtgtgggtgaatcttttttcttatattctgcttgctattttgtagactttcaatctgaagcattggatttttctttagctctaggaaatttaccctttaaaaaaaattttactccttttccttttttccgttctctccttttggaattctttttggataaaggatagaatgtatggattaatctgacatgtctcttttctcccagtttctatctctgtgtttgggatattttttcaactttatctttcaagttgaaatgtagtttagccatgtctattcattatccagtttctaaaaaaaggtctttagtgttcatatttttcatttccaattacttttctctcaattgctcctcttccttaattgcctgttgttagctgataaatgtctctgataatagtaattataattaaaaaaattttttttctctcatgttccttgcattctttgtttcctgttgtattagcaggcttattttggtctttcctttttttgtgctgttgattttcctcagtgtctggtgaacactgatttaacatttgtatttttgtttttgtttttttaatgttgaaaatgtattttatttttctatttttaaaatatgtttttatttcaatagctttcagggtacaagtggtttttggttacacagataaactgtgtagtagtgaagtctgagattttagtgtacccatcacctgagtagtatacattgtacccaatatgtagttattttatccctatcccacccccagcttttgagtctccagtgcccattatttctgtatgcctttgcatactcacatagcttagctcccagttaagagtaagaacatacagtatttggttttccattcctgagttacttcacttagaataatggcctccagctccatccaagttgctgcaaaagacattatttcattatttcttttgtatggcttgtattctatggtgtatatataccatattttctttattcactcattgattgatgggcacttagttggttccatatctttgcaattgtgaacatttgtttttgtgaacatttgtatttttgagtgaaagactgtgttgccatgttgattggtggagacagtgcagacgttaggtaactttgcagttctgtaggtctgttccaaagaggtcactcttctgagtcagaggatgtcctgtaggctctgtctaaattggtggtacctgttgaccagcgggcttccctgtaggataagtgggagagggcactgggcctgtttcatgtgtttacccactctagatccatctcacgggtctctagttacctctgctgtgtccctctccagagccccagcatctttctgcagagctccccaggcagatcttccaccataactgaacagagttcaggggctccctgaggaagcaaatgcttcctatgtgaatactggccttcaactccatttttaaggatgattcccacacccaggctgaaacctgaatcgagttcttcccaatccccacatttatatatccagataaagttttcagaattatcttctatagtggcagccttgtccattttaacctaaattctatataataataaattttaaatcagtgaggttttattatgtactaactttataaaaaaagaaatgtactgttttgactgaatttattgataaatttgtcaggtttgtcagatcagtagttaataccccactttaatgtgatttttagatcactaactactttcttttcctctaacagagatattacttcccttgtgagccaagtgatacctatttttgccccttttcatctatttgatgcacttgcagtgagtatttggagtgattttactctaataaagatagcaaaatttgttttgtgtttctagctttttaattagaaattaaaggtcggtgattttatttttaaaaagagaaagctcttgctttagacagtgtgagtcacttgggggaagatggtttattaaagagtgtagcctctcaaggtggagaagaggcttgtgagccaagtgagttctcccctcctctatcttcatctggtgcctgaatgccaggtgttgtatccaagtggtgaggtgacctttgcttgaaccctccactgcaggccacgccacctttgagttgactctgaccactagaaagtccctgtctaggctgatctgtgggtgtacaagggtttgaagacctgctctaccccagaatcagcccatccggcttcttcccagtttgagttttttcctcatgacatgatttctaggcattagtcatctttttttccatggaatttcttgcactttgtccatgtcatcctgaagatgtggcacccattgaaactgtggtaagaagtgtggatgagaagcctgcaatggcgttaatgtttctcagccatgatattaggctaacttttgaagagatgccattgatgaaacctctacatctttttttaacttacaaaatgtttttaaatagtcaagataaagagttagagatttaagtcatgttatgataggtttctgatgaaaggagctgcggttttttattgctgttgttgttaatataactttagaaacaaaagatttcctttttctcttacataatgtgctgtgcctgttttgagttagggccatttgactgtatccatatttctgagccttgtgatgatgacagacttgacagcaacattgggtttggttttcctctccatagggcgcctgtggtggagtcctgagaggtacaggaaaacaaaacattggcgctatcttgaatgccattgggtactatgtctttggttttcccattggagtatctctgatgtttgccactaaactcaggataataggtatgtgtttgagtcctgtgacttgtctcaaatctcacttgtcatattaagataaactgcttgagatataaaacaattgactccagccccactggaaacaagaaaacaaaataactcttaaaaaaaagcaatcaactagaaagttgcccttgtgttaataggaaaaattattttctcccccaatatttattgggtgcctcctccacacaaatacactggaaatgcaatggcaaacaaaataaacatggtcctgccctctgaatgagggccagattcaatacttatttatacaattgtcaatacctgttggttaagcattgcaaaagagaagaagagggcactgctcttctcttttttccggcataatgcctctagtagtacaataagttgtggtaaaagtggaaattcttgtcttattcattactttagtgatagtgctgccagtgttcctctactaaatggtatgctggatttgaggttgaaatacacgcacacggccaggcgcagtggctcacgcctataatcccagcactttgggaggccgaggcgggtggatcatgaggttaggcgtttgagatcagcctggccaacacagtgaaaccctgtctctactaaaaatacaaaaatttagccaggcctggtggtgggcgcctgtaatcccagctactcaggaggctgaggcaggagaattgcttgaacctgggaggcagaggttgcattgggccgagatcgcgccattgcactccagcctgggtgacagtgtgagactctgtctcaaaaaaaaccaaaaaacaaaaaacaaaaaaatgcacacacacacacacacacaactatgaatgtatgtgctcgtgttttttgaaatcatgttcaggaaatgtccatgaagtctattttattgaaacaaaaatagttgagcattttgccagatgcctttttagtgctatcagaaatgattctataatttttctccttaggtctatcatgaagataaatactattaaattggtgtcctcatattgaactatcctgattatgatatcttgttttttattgaactgctacacttttttttttattttttttattttttttttgtttaatttttataatatattttatttaacccaatatatccaaaatcatttcttttttttttaatttatttttttattgataattcttgggtgtttctcacagagggggatttggcagggtcatgggacaatagtggagggaaggtcagcagataaacaagtgaacaaaggtctctggttttcctaggcagaggaccctgcggccttccgcagtgtttgtgtccctgattacttgagattagggattggtgatgactcttaacgagcatgctgccttcaagcatctgtttaacaaagcacatcttgcaccgcccttaatccatttaaccctgagtggacacagcacatgtttcagagagcacagggttgggggtaaggtcacagatcaacaggatcccaagacagaggaatttttcttagtgcagaacaaaatgaaaagtctcccatgtctacttctttctacacagacacggcaaccatccgatttctcaatcttttccccgcctttcccgcctttctattccacaaagccgccattgtcatcctggcccgttctcaatgagctgttgggcacacctcccagacggggtggtggctgggcagaggcgcccctcacctcccggacggggcggctgggcgggcggggggggctgaccccccccacctccctcccggacggggcggctggccgggcggggggctgacacccccacctccctcccggacggggcggctggccgggcagaggggctcctcacttcccagtaggggcggccgggcagaggcgcccctcacctcccggacggggcggctggccgggcggggggctgacccccccacctccctcccggacggcacggctggccgggcgggggggctgaccccccacctccctcccggatggggcggctggccgggcggggggctgaccccccccacctccctcccggacggggtggctgccgggcggagacgctcctcacttcccagatggggtggctgccgggtggagaggctcctcacttctcagacggggcagctgccgggcggaggggctcctcacttctcagacggggtggttgccaggcagagggtctcctcacttctcagacggggcggccgggcagagacgctcctcacctcccagacggggtctcggccgggcagaggcgctcctcacatcccagatggggcggcggggcagaggcgctccccacatctcagacgatgggcggccgggcagagaggctcctcacttcctagatgtgatggcggctgggaagaggcgctcctcacttcctagatgggatggcggccgggcagagacgctcctcactttccagactgggcagccaggcagaggggctcctcacatcccagacgatgggcggccaggcagagactcctcacttcccagacggggtggcggccgggcagaggctgcaatctcggcactttgggaggccaaggcaggcggctgggaggtgtaggttgtagtgagccgagatcacgccactgcactccagcctgggcaccattgagcactgagtgaacgagactccgtctgcaatcccggcacctcgggaggccgaggttggcggatcactcgcggttaggggctggagaccggcccggccaacacagcgaaaccccgtctccaccaaaaccagtcaggcgtggcggcgcgtgcctgcaatcgcaggcattcggcagactgaggcaggagaatcaggcagggaggttgcagtgagccgagatggcagcagtacagtccagcttcggctccgcatgagagggagaccgtggggagagggagagggagagggacagggagagggacagggagagggagagggagagggagagggagagggagagggagagggaactgctacactttttaaatattttattaaaaaattttgcactaaaatttataagtaagattggtctgtaattgtattttttgtgtatctttgttaggttttgatattaatgatattaatgttatactcacttcttaaagataattaaaaattttacctttttgtatgcctcaggacaatttaagtagtataagaattctctgttttataaaggtttggtgtaattcttccatgaaactgccatgacctggcattttgaagtagtttattctttgtacagctttctcaatttcttctcagtctattaagactttcttttattgtgtcaacatgggtaagttatattttttaaggaaattatccactttattgaggttctaaatgtaaagaattgtgcaaattaacttatgtgcttttgggataagttgttatatatgtgttttgcatatatgtccacatcttcattttctacagatttagcaacaatgaatttcattttgtttttaaaaagtctaactagaaaatggaatgagtcctgtaatatgtactcaaataactccttttgttctgtatccaaccagtgcattacttttactaggtaaaaactctgattctgtcaccatttctttgtgaagtattagtcttacagctgtcacaagaactttgtgtcaacacaaacacagcggctgtttcttatcgtctttttggaaatgtcatctggtggattaatgagtaagtgtcttctgtgtcatctcccacttaaatgactggtacaggctgggaccataggatattttatttcaagctggaattcgtcattatttatttggggacagaacagccatatttattactgtctcttctctaccaagcactcttggattcccaatactattttccatcccgtggttggacggattgttttcaaggcaagcttttgaaagcatcaggtctcacatctgtggatgcacaccccaggcttgagctctgtggcaggtccccgtcagccttaggatgaaccccagtcctaccatggcattcacatcctttgagcctgcttctctgaccccatctcctggatgctcccctgccactgtgctcctttctgactggcccctcagctcctgggactcctctggctggggttcttctcttccctctgcctgcagtgcccgtcctagacttctcatggcgtcttctcgctgccaggtcccaccttagaggggcctggctgtctcattcacattctcatctgcaaatctttggtgctatgacgtggctctgcccagtgtctgtcctggcacctctcactcctaaaatgactgcatgattgcttccttgtttattatttgtcctgcacagcagaacataaactcccaaggacaccttgctcatctgcctgttcagttctgtatctctagcccttaaaacaatacctggcataaaactgaaggcagcaagtatttgttaacatacaagcagcaaacagttttggaggtgttgtgtcgttcattgattgaatgattgccatgaatagctcagtggtaaacttgagtctaatctttgtccataattatctaaaattttatctaaaattttagggaaattaactgaaatttcactctatggatacagtagttagggaagaattttaatgctcataggaacagaattgaaaaaaatctaaactctgatttcattttatacccataggtctctggtctggattgatagtttgtgtcttctttcaagcccttttctatctggtgtacatcttgaggataaactggagcaaagttgtggagcaggtaacagtcagtgtattattttagaaacatggctctacttaatcccatggcatggtaaggaacctcttagggtcaaaatggtaaaaatgctattggcagaatgattcactgtgaatcatgaaatacatctaacattgtggggaggggaggcaaaagaaaacatatttcagcacattttcctctttatatagagctgatttaatatctactaaccagggactcaacctaaaaaagaaaaggaattagggccaggcatggtggttcacacctattatcacagcactttgggaggccgaggcaggaggatcacttgagcccaagtgagtgtgagaccagcctgggcaacagaggaagaccctatctcttaatttaaagatatatatattttgctgtttgggtgtactagttgtaggaaaatagtagtttgtttcctgtttatactgacttgttagctgttctttatgcctctttctattttgtccatagtttcataaaagcactatgttaagtatctgtgatctgtgggaagtactttgggggcagaacaacaacatgtggatagagtctgcatcttcactgatgtgagcatctacatgctgaactgggagccatttttttgtttgtttttttctcgagacggaatctcgctctgttgcccaggctggagtgcaatggcgcgatctcagctcactgcaaccactgcttcctgggttcaagcgattctcctgtctcagactcccaaataactgggattacaggcacgtgccaccacgcccggctaattttttgtatttttactagagacggtcgtgggttgggggggttcactttgttggccaggctggtctcgaactcctgacctcatgatccacccaccttagcctcccaaagtgctgggattacaggcgtgagccaccatgcctggccaagcagtttttattgtttgaggcttgagatgagatgggtggttgggtacagtggctcacacctgtaatcccagcactttaggaggctgaggcaggaggatgacttgaggccaggagttcaagactagcctgggcaacatagcaagaagccatctctactaaaaataataataatacttttttaaaaaaagagatgggtggttggcttagggattattaataaggaaacaagatgagtttaggcatgtcaaccatcactgtctaagctttgaccacctttatgctttagatttgcctaactatgatgcattgtatctttcctatcttctgtttgatttattcagggactaaactttataggagattaagatgggccataaactacccattagatcacaataccattgaccttcagaccttcttccttctatctgtgtttcggagcactgaagggcacaagtgcaaatgatatgttaaacttgccgctccagcaacagcagctttttatattattgttgtgaactgagtctgtgtttttctggtgttgttctcttgctttatggcacatccaggaccaagacagactgtgctagatactgtaacccattagcagtaggtttcatagtagctttatttatttttcgagacagagtctcactctgtcactcagactgcagtggaatggtgcaatcttggctcactgcgacccccacttcctggattcaaattattctcctgccatagactcctgagtagctgggattagcccaccaccacgcctggctaattttttgcatttttagtagacatggggttttgccatgttggccaggctgttcttaaactcctggcctcaggtgatccgcccacctcaaccttccaaagtgctgggattacaggtgtgagccattgcgcccagcccacaatggctttaagtcaaagttttagcaaacaactactagcgtgattaaacttactctgcatttactcatgtgacacttgtttctaggcacaggttcaagctggactaaaagggaataaagagaccatgcctacctcctcaggtaacagaggccattctctagtatattcaatgtctgaggtacgaaaactgaaacagtgtagccagagttgctcagtttgcaagatcctgctctcttgctcaataaaacttgtctcagccctagtaattggtgagatcacctgtgggttctcctatgaaatatttttaaatgtaatttcacatatactaactgataactgagggttattgtttataacgtattcttaggtaaacttcataatatgcctttacttgacataatatgcctttactggacataagtgaataccccactattctctgcaaacagatctacctatcttgggaagagaagtaactgatggaatcattttgcctgatatcatcagaccagagagccagacccctcgactgatgagaccagaagaaaacacccagtatgcaatgtccaccgctggagaggtcctgacagtgaggcagctgatattctatcatggaatggctttagctcttgctgtcactttcctttcagcaggaattttcattaagagttttcaatgaccatggctaaaatggtagaattaccaccattctacaaactagaaatgataattatatgccatatgttaagtatgaaaggtgaccttgttatttggacagtttttactcttaactgtggatggaaagaatatcagggatgtttccttggttattccaaggaattgcactatcctattggagatcaagaaaggggctataattttaagtaaagttttccctgttaattttatcatggtttctaaatatacaaattagattttccttgatgtaaaggttacttactctttcttatttcaaacatctttcttctcctggggagtggttcatagtcctgtaaaatattattgctgatctattttctttgtatttctctatgaatgtacttaatcttgtcagtgagtgtatattaagtgcttgttcaagtcctatctcaggtattgccatataagcttttataaaatggaacctcttaaaatttacaatgtatgctgacaatatttggagctatacagtcaatacaaaagattaacttttagcatttttgccttttaattaattttgtggcaactttcatttaaagtagaaaataaagtagaaaataaagagctgtgttctcttctgctactcagctcccagaatgctggcagctatggtggcctcatcctcaaagcaaaagagttttagtcttttataggaaattagaccagcccaaaaagaaaatccttaaaaaaatctgaatattgggtattctctcacacaaagcccaccagattcccaggagaggagcccacagtggaaagcacccaatgtcaccagtgcttcccttagcttatttgtctccctctcttgagtgttaacaagcaacccagtattatcagattatttgtgaaaatccaattataggagaaagcaaccagaaaaaaaataggcattatagggagaaaacttacatcttcaaagaggtaacgcaaaatatttcaactatgatatagaataggatgctatagaataaaacattcagtcaggtatggtggtacacacttctaatcccggcactttgggaggctgaggcaggtggatggcttgagcctaggagttcaagaccaaccttggtaacatggcaaaaccccatctctacaacaaaaccacacgtctgtagtcccagctactcaggatctgaggtgggaagatcacttgagcccaggagttcgaggctacagtgagctctgatcacaccactgcactccaaaaaaaagttttttttccagaagattatgtatgtacgtatgtatgtatgtatgtatgtatttagagacaggatctggctctgtctccctggctcaagcagtggcatgatcacagctactgtagctttgatctcctgggctgaagcgatcctcccacctcaacctcccatgtagctgggactacaggcgtgtgccaccacttctggctaatttttttttttagttttagtagagatgaaatctcgctatgtttcctatggtggtcttgaacttccgagctcaagagatcctcctgccttggtctcccaaagtgctgggattacaggcgtgagccactgtgactggccctagattttattgaagtaaaattcatataacataaaattaacccttccaaaacatttttatcataccaaaaaggaaactcagattattaacctctcactccccatacccctctccctgagttcctggcaaccactaatctgctgtctgtgcctgtggatttacctattttggatgtttcataatgaaggaatcatagaacatgtgaccttttgagtctggctttttgaacttggcatgcatgatggttttgcaattcctctatttttttttttgaaacagagtctcattctgtcacccaggctggagtgcagtagcacgatctcagctcactgcaacctccacttcccaggttcaagcaattctcctgcctcagcctcctgagtagctgggactacaggtgcgtgccaccatgcccggctcatttttgtatttttagtagagacggggtttcaccatgttggttaggctggtcttgaactcctggcctcgtgatccacccacctcggcctcccaaagtgctgggattacaggcatgagccaccatgcctggcccgcgattcctctatgttgtagcatgtctctcaaaacttgattcctttttctggctgaatagtttattgtgtgatatgccacctggtgtttattaatcagttgatggacttttagattgtttctatgttttggcaattgtgaataatgctgtagtaaatactcgtgtacaagtttttgtttgaacacctgttttcgcttcttttgagtctatacctaggagtggaattactgggttatatgataattctattttttttctttctttcttttttttttttttgagatggagtcttgctctgttgcccaggctggagtgcagtggcgcgatcttggctcactgcaagctctgcctcctgggttcacgccattcttctgcctcagcctcctgagtagctgggactacaggcacccgccacgatgcctggctaattttttgtatctttagtagagacagggtttcaccatgttagccaggatggtctcaatctcctgacctcatgatccgcctgcctcggcctcccaaagtgctgggattacaggcggataattctattttttttgaggaactgccaaaatgtttcccatggtggctgcaccattcttcattgccaccagcagtgtatgaggtttccagtttctccacatccttgctaacacttgtgattttctttttgattttagttatatcatactagtgggtgggaagtggtgtctcattgtgattactagagatcacatactactaataatgccaagcctattttctgaaatacttcagaaactcagatacacataaagaaaggaattatgtactagaaaaggaataaatgaaggtaaaatattttatccttcttatttttaattgataaaaaatatatgaaaataatagcaacaatgtatttggttattacagcttgtgcatagctaaaatgaatgacaacagtgttataagggtcaagagggaggaactgagaatattctaaggcacttgcattacccatgaagaagaatagtgttattcaaaagtggaattaggttagttgtaaatgcatattgcaaactccaggacaactaatgaaaaagtttttaaaaagtaatataatcaatatgctaagagaagaaagaaaatagcatctcataaaatgctcagttaaaaccacaatggaagaaaaaaagtaacaaggacaacaaagagaaaaggtgggcagggcgtggtggctcacacctgtaatcccagcactttgggaggccgaggtgggcagatcacgaggtcaggagatagagaccatcctggctaacaaggtgaaaccccgtctctactaaaaatacaaaaaattagccaggcgtggtggcaggcgcctgtagtcccagctacttgggaggctgaggcaggagaatggcgtgaactcgggaggcggagcttgcagtgagctgagatcgcgccactgtactccagcctgggcaacaaagtgagactccgtctcaaaaaaacaaaaaacaaaaaacaaaaaaatagaaaaggtaacatatacagatactaatctcactataccaataatgacaccttttctttgaaaaaaaaaaaaacacttaataaagtgagaatagaaggaaagctcctcaaaatgataaaagccatatatgacaaacctccagctaagatcatactcaatggtgaaagactaaaagattgtcccctaagatcaggaacaagacaaaaatgtctgttttccccacttctattcacaatactattgaaagtttaagatggtgcaattaggcaacaaaaagaataaaaggcatttacattggaaaggaaggagtaaaattacctgtgttcaaaaataacatgatcttatatgtataaaacccttaacattccacaaaaccattagactcaattaacaaattcagaagtcacaggatgcaaatcacaacacacaaaatgagttgcatttctatacactagcaatgaatgatcccaaaaagaaattaagaaaacaattacatttttaatagcatcaaaaagaatcaaatgcataggaataaatttaccatggaggcaatagacttgtacacgaaaaactataaaacataattgaaagaaattaaagaagacataaataaacggaaagacaatccatactcatgcatatgaagacttaatactgttaagataacaatattaccaaaagtgatttaaagattcaatgcaatctctatcaaaatccctaagacatattgcagaaatagaaaaatccaccctaaaacacatatggaatctcaatggacccaaatagccaaaaatgtctgacaaagaagaacaaagtgaaaggactcagattgcttgattccaaaacaaactacaaagctacataatcacagtgtggtattggcataaagacatgcctatggacagaattgggaatgcagaaatgaacccttgcatatatggtcaaatgacttaaacaagggtgccaataccattcaatgggaaaaggaaagtcttttcatcaaattgtgctgggaaaactggatatccacatagaaaagaatgaagttgatcccctatttacgatatataaatattagctcaaaagtggtcagtctgggtacagtgactcacacctataatcccagcacttcggaaggtcaagatgggctgattgcttgagcccaggagttcaagaccagcctgagcaatatggcaaaaccctgtctctacaaaaaatacacacacacacacacacacacacacacacacacacacacacacacacaaaaggtgtggtgatgtgtgcctgtagtcccagctactcaggaggctgaggtgggaggatcacctgagcctgggaggtgaaggctgcagtgagttctgattgcaccactgtactccagggtgactgagtgagaccctatctcaaaaaaaaaaaaaaaaagtgatcaaagacctaaacataagaccaaacactaagcctgccagaagaaaacataaggggaaatctggatttggcagcgattacttggatatgcacaagcaacaacaacaaaatagataaacaggacttcataaaaattagaaacttttgtgcataaaaggacactattaataatataaacaggtaaccttctgaatgggaaaaggtatttgcatagtatatatctgataagggatttatgttcggacataaattcttaacaactcacaagaacaaaatatacaaacagcctaattcaaaactaggcatatggctggggatggtggctcacacctgtaatcccagtactttgggaggccgaggcaggtggatcacttgaggtcaggagttcaagaccagcctggccaacatggtgaaaccccatctctactaaaaacacaaaaattagctgggcatggtggcagccacctgtaatctcagctactcaggaggctgaggcaggagaatcacttaaacctgggaggcggaggttgcagtgagccaagatcacgccactgcactccagcctgggtgacagagcgagactctgtctcaaaaacaaaaaacaaaaaaactaggcataggacttgaacagacatttctccagagaagatacatagctaaccagggcatgaaaatattctctctgcatcactagtcattagggaaatgcaaatccaaaccacaatgagatattactttatacctattataggggtcattacagaaagaaaacagaaagcaagttttggtgagaatgtggagaaattggaactattgtacattgctgatgggaacataaaatggtgcaaccactatagaaaatagtatgtgagatctttaacaaatatagaattatgatatgctgcagggactcaaacagatatttgtacaccagtgttcacagcagcattactcacaatagccaaaaggtagaatcaacccaaatgtccattttgtaaatggataaacaaaatgtggtatacttacaatggaatattaatcaatcttaaaaagaaatgaaactctgatatatgctatagcatggatgaaccttaaaaacattgtgctagggctggtggtgttgtggctcttgcctataatctcagcactttgggagatggaggcaggaggatcccttgagctcaggagtttgagaccagcctgggcaaaatggtgagaccctgtctgtacaaaaaattttaaaattagccaggtatggtggcacatgcttgtggtcccagctactcaggaggctgaggtgggaagatcacttgtgcctgggagattgaggctgcagtaagccatgtttgtgccactgcactccagccagggtaacagagcaagaccctgttttcccctaaaaagaaaacattgtgctaaggaaaataagccatatgcaggcctattatacaaggacacttgtacaagtacgcaaagacacatcttgtatgattacacgtatgtgaggtgcccagaatagtcaaaatcataaagtatagaggttattaggggattgaaagagagcaagaggggaattattgtttatgggtacaatttctgtttgggatgatgaaaatgatctaaaagtgaatgatattgatggttgcagaacattgtgaatgtacttaatgtcactgaattgtgcaccttaatggttaaaatagtaagttttatttattttatttcaataataaaaatgcctgtaatcccagcactttgggaggccgaggcgggtggatcatgaggtcaggagatcgagaccatcctggctaacaaggtgaaaccccgtctctactaaaaaatacaaaaaattagccgggcgcggtggcgggcgcctgtagtcccagctactcgggaggctgaggcaggagaatggcgtgaacccgggaagcggagcttgcagtgagcgagattgcgccactgcagtccgcagtccggcctgggcgacagagcgagactccgtctcaaaaaaaaaaaaaaaaaaaaaaaaaaataataataaaaatgcctcacttggatcacaaacatctacaaaattctacagataacatattagtcaaaagaagctgcatgccttcctgctaatattaggaacaaagcaaggatgtcccctctcaccactcattttcaacatcgtaactgaagttttagctaatgtaataagacaaataaaggaaatgtatacatattaggaagaaagaaattaagctgcctttgttcacagataacatggttatcaaggtagaacatcccaaataatcaacaaaaaagatttctggaactaataagtgattatagcatggtatcaggatgaaagttattatacaaagtcaattattttactatacaatagcaatgaacactttggatttgaaattaaaattaaaaacaccacttacattagcaccaaaaaggggcggaaatacttagatataaatctaaatatatacaagatctatatgaggaaaactacaaaattctgatgtaagaaaccaaaggagatgtaaataaataaagagacagtccatgttcatgaaaatgaagagttgaagttgaaaagatgccagttcttctcaacttgatacatggattcaacactctcaatcaaaatctagcagtttattttgtggatattgaccaacttgattctaaagatgacatggaaaagcaaaaacccagaatagccaacacaatgttgaagaacaaagttggtagactgacactaccaactacaggatttaccataaaggtaaacacaataatgtggcattgatgactgaatagacaaataaatagaacagaatacaaaactgaaaatggattcacactaatacagtcaactaaggtttgacaaagaaacaaaagcaattcaatggagaaaggacagcttgtttgacaaatggtactgaaacaactagatatccacatgccaaaaaataaaacaaaaccaaaacctagagaaaaatcttgtatctttcttttcttcctgacatgcatcactataaaactcctaggataacacaggagaacatctaggtggccttgggtttggcaatgactttttagatacaaaaccaaaagcacaattcatgaaagaaaaaattcataaaatggacttcattaaaatttaaaacttgctctgtaaaaaaacactgttaatagaatgaaaagacaagccaaggattatgagaaaatctttgtaaaaacatagcttatataaaagactatttatctaaaatatacaaataactatttaaactcaacaataaaaagcaacccaattaaaaatggtttaaacagacacctcaccgaagaatctatacagatggcaaataaagatgtgtaaagatactcaacattatgtgtcatcagggaattggcaataaaacaatgagataccactacacacctatgagaatggctaaaatccaaagcacttacaccaccaaatgctggcaaggatgtggcacagcaggaactcttatatattggtacgaatgcatgatgaatggtacagccactttggaagagttttgcagtttcttacaaagctaagcataggtctccaataagcacatacccaaataagctatttacccaaatgagttgaaaacttacatccacatgttttatgtattttttgtatcttttatgtatattttaccattttaatcattttaagtgaacaattcagtggcattaagtacattcacaatgttgtgcaatcatcgccactatttacctccagaactttttcatcattccaaattgaaactctgtccccatcaagcagtagctctgttaccataaccgcttcccttgccccctgccccagcccttagtaaccactgttctactttctgtttctatgaatttgactattctatcatgtaaatggaatcatttgtctccttttcattttatgtaattttgtcaaacttctctttttgtatctcttaccttttgttctcatgcaactttcatctctattaaggtgtgcttttctcttctctttctttcctgagtttcaattcgagtttgccctctcctgttttcttataatctattctttaatccctcacagccttcctttgggctaactcctccgcccccgcccccaaagatcatgtgtcagtgtcttaagagattgtgagaattacacatcagaatgcttcatcttttgtaaagatctttatctccttttccttagagttatatgcatgtgtgcgtgtgtgtagtgtctatggtcctgtgtttgttcttttctattattgatctgtggacacaaacatttatattggcatttgctgaagaagagtgttttgaaagttaggaaaggtgtccaaggcagtctgaggcttcaattcacgtctgttgtcttaaacacctttcataaaatctgctattcccagctatggaaatatgtgcaaatagtcaatacacatgaaaaggaacccaccatgattagtcactagggaaatggaagttaacatcacaaggagatatcactacaagctgggtgcagtggcccacacctgtaaccccagcactttgggaggccaaggcaggtggatgtcttgagctcaagagttcaagaccagcctgggcaacatggcaaaaccctgtctctactaaaaatataaaaattagccaggcacgggggcacacacctgtaacgcaagcaactagagaggctaaagtgagaggatgacttgagcccaggaagcagaggttgctgtgagctgagatcataccgctgcattcctttttttttttttttgagacagagtctcaaaaaagaaaaaaaaaaaagagagagagagagagagatcactacgcatccaccagaatgggtaattatttttttaaatcaagttttagaaagcagctgctagactgtgtggtagggaatataaattggtataaaaacactgaaaaattatttggcttctaaagttaaaacatgtatttactttcacccagaaattctatagtggtgattgggtaggggcctaaaaggaatgctggtaatgttctgggtcatagatacaggtaggtaaactctgtaataatttactgtaggcactgttttgtatttatgtagtatccaatgaaaatgtaatgaaatttgggccagaaggcagaaagaactcctgggtacacactcactaccttagtccccctgaggtttaaataattaaaagtgtctgtttcatccttgcctttaagaaaactctccctgctgataactgagcagatcaaagatctaaaggttgtggtggagaagggtcatggagttgattacccccaataaaaacaaaaagaaaaacttggttttttttaagctgaaaaaggaggatggaaaagtatagtgggcaggcatagtaaaatcactacagtctactgcattcctgaaaggagaagcttgtgaggactcaccccttacccctataacctgctgtggtgatttcattacccatagctacttaaatcaatgagtatatcatattcaaaagctgaagggagaatgtttcagcttgggagtgtagtaaaagaattcccagtcctctctttggttccataaatatatcaccttgttctattaaagcacttggatgtgatttttaaatatgcccaacaaaatgccatcagttgatttctctaactaataaagaaaatgttcaagagttggtagtaaattcttggtgattatgccattagaatcagagtacatcgtttgtaagaaatcctcagcccggcacggtggctcacgcctgtaatcccagcactttgggaggctgaggcagcggatcatgaggtcaggagtttgagaccagcctgaccaacatggtgaaaccctgtctctactagaaatacaaaaattagctgggcatggtggcacatgcctgaaatccacctattcaggaggctgacacaggagaattgcttgaacctgggaggtggaggttgcagtgagctaagattgcaccactgcactccagcctgggcgacagagcgagactctgcctcaaaaaagaaagaaagaaagaaatcctcacatcttatgctcagcaaaagcagcagctcttcgctacttagcaattaatttgccctaggtgaaaccgattcctgttctaattccacactggaattctgttcattatttacattttttttaaatggaagcatgattcatatctcaatttacctagttccttacacaatatttattagccagcatttagaactggttaccctttcagatcagataaagattattgggtacactctctggcggcctttgagctgatttaaatattgttgccacacggttctagatactgatattagttgattggcttcctatgcacaagcactcctcagttacttacataattgaattaaacactttgtatatgttggagctactgcttttgttatataagcctgcttgccttttcacctactgtctcccaactttaactatggtatttccacatgggctggatttttttgtttttgtccaaagcaggcaagcgagaagtagaagtgaagaagagtttgatggtcttgccaatttccttgcttcatcatgaatctccttaagcttcaaattacaggctgttgagaaagccacaaaagtagacagtgccaagacactaagactagagtatgtgagagtgtaccattcattcattcattcattcaataaatacttactgagcacctactgtgggccagattctattcaaggtactaacattacagtgaacatgaacaacaaagaccctgattttacaagatattccagtgaggaagacacattaaaaacaacaaacaaatagatacatttatattaagaaaaataaaacagggtcagggacagaaagtagcagagactgatattttagacatggtggtcagggaagtcttctttagggaggtaatattgaagcagcaattgaattaagtgagaatgatagctggacactacaggcaaaggaaacagaatgaatgcaaaagccccgggctgggaatgtgtttagaatgctcagtagtgtacagcaaggaaggcactctggctgaaactcactaagtgggagaatcctacaaaaagaggttgaagatgtagtcacgggccagggcatttagggcttgtagaatatgtgtagaaaaattcacattttgaattttattctaaacgtgaggggaggctattggaaagttttaagcagtgaattaacatgatcagggtaccttcggacaccaatggctaggtggagaacaggctacaacaaagtgttatcagagtccagtcacgaaagataaactatctagttatttcatgcagagggaattttaagagtaatagatgtcaaaaagaataatggagtgacatcatagataaaaaagctgctaaaaatacccttagctggaaccaatggaactgcaccagcttctgtgccatttggagacactatcactttcatcctctgtctactagagaggtgccaccttgaccatggaaggaattcctagagtaaagaataatccctcctccactttcactatagaaatggccagcaactgccacacgattgaatccagaagcagtaagttactctccacctcctgccttctgatttccttatagtgccccctactggcagaagccagcgggcacgagagcctgggaaatggggttcacacactctaggtccctgcagtagagtataaaagggcaagtgtagaactgagaaataacaatctctagagtcaagagtagaagcagggggccggcgaggtggctcacatctgtaatcccagcacttcgggaggctgagggagggggatcacttgagcccaggagtcggagaccagcctgggcaacatcgcaagccctcatctctacaaaaaatacaaaaaaatttagccaggcatggtgacacatacctgtagtcccagctacttgggaggtggaggtgggaggatcacttgagcctgggagctggaggctgcagtgagccatgatcatggccactgcactccagcctgggtgacaagagtgacaccttgtctaaaaaaaaaaaaaaaaaaaaacccgaaagagtagaagcagggaaaccatcaggatgcccggcctgttttttctttttcatttttttcccctcagctgtggtaatttagccaattcaaagaccttgttctccataatttcaactttccttcagatttgaccaagtcaagtagagctggtcaaacccaatgggaaaaagaccaaaacaacaacagaaacaaacaaagaaacagttaagcaaaagaaatgatcgcacaatttgtattattgagcgctctaatggtaaggagaaattaagaccagctggttgttaatcttaactttagtcaccaaggagagtttccaagacaaaactccaattcaggtgcttacctaggaatagggtccaggctcaagactgctctttaccattttagaaggagaaaaaaaactcagactcaccttccctgctggaagccagatgaaattccagaaaggagttgcctcccctccatcgtcatggaggcaggaaaacgcaccttctttgttgggagtaagtaaaactgcagacaaagaggtgtacagcaaaataaactttagatctcaaccaaattttgggacatcagggattctctggagtggggtgctcccaggcctcagcaaattgtcctgtttgagcaataaaaatagcccaagctggtaccaagcactgatagatttgtcaaaggtcagggccacctccactgagtcacttcctttggctgccagcttgtaaaccaaaaccagctctcaatcaatttggaagtttattttgccaaggttaaggacatgcttgggagggaggtctgtgcctttatctaaagatgattttgagggcttcaatatttaaaagggaggagcgggctggaggggaaagagggagaacatggtcattactgaatccacacattgcacaaatagaaaaaggaacaggcaggggaatagtcaattatgtatttgcctcctgctgtgtaaatcagcacttcagtaagataaggtgaggacagagcagctacctgtggggacatttaaccttttatctgtagctatctgcttagggacatagagaaaggcagtttcttgcatgactcagctttttgcttaattttttccttttggcatagtgaattgagctcccacggtttttgttgttttgtacataagtggagagttcatttgggccagggccccgagttattttcttttcacaaatataccctttagagttcagaggaaaggctgggattagagccttctgtgagcactattcatgggattacatgagggagtggctgtgaaaagagggccccggactaagccctgggcacctgaacaagtgagaggtcaggaaggggagaaaaatccagcaaaggaaccccagaggacccggccagtgagctaaaaagaaaagtgcagaagagtgcagggaaatggtaaagaaaagaaagctttccacaagacaggaccgatcagctgagccaactgctgctgagtacagtgatgagagctgaagtctctcgcccgaaaggcaataaggcgggagggggaaacctgagggcagcgggttctctcttgggagcgggaacacggaaccatgggcagcgaggcaaatgcagcctggggagaagctctgagtaacggacgtgcgaggatgatgcttgtgcaagaaggaaatgaccgctgtcccggctccgcgggagacgaaccccggcttcccgccctcagggactagctctccagggaactgggacggtcagtgccggtcgaggcagctcctcgctgaaggaaggagcaggggacagggaagcggaatggggagcgctaggcctccaactacgtccatctggccatgtttgaagagccacaaaatggaggagggaacccctcagagcgtgccagagcggagactgctctccgtcgcagtcggggcgcttccggcagggcgcccactcccagccgagcgccctccgcctgctcctccaggattcctcttcgccctttctggggccgccccggggcgctctcagcaggatggccaacaccttccctccatccctacaccccgccgccccctggcccgtggccgcgctcggctcccgcactgctcactccaccccctacatcccagcccgctgccagagccggggagagggcgggggccgcgtgggcgaggccgtgaacagcggctgtcacgtgggccgcccaggccaataggggtgaggctttgggtcgagctcagtcctcccccggcgcctccgactggcagtgggactcagcgggcgtggaggtcgcggctgagcgagcgagccctgggcgagtgaattgtggctgtgggttgacggtggagacaccccccggagggaggcggagggaagggaggcgaggcctgcacctgcatgcttcccgcctcccactccccagcgcccccggaccgtgcagttctctgcaggaccaggccatggagctcgaagtccggcgggtccgacaggcgttcctgtccggccggtcgcgacctctgcggtttcggctgcagcagctggaggccctgcggaggatggtgcaggagcgcgagaaggatatcctgacggccatcgccgccgacctgtgcaaggtacgcacgcgtgcggcggggtgtggggaaactggcccccgccgcgcacttgtggactggagcttcggctgggttttgtttttgcttttacatttcggattactccagcactgggagtatgatctccagcgatacagataaagccaaagttcccgcagactttcccggtcctctagcactcagaagggcatatgttacctagcttctgtggttccttttctgccttttctattcttgtccatttttctgttacatttgtggttcttttccttatgatgtgtaggaactctttgtatattctggatttaagtaatttgtcagtttactgtattgtggatactttctttgggtttctttcttttctttttttttaagccaaatttagcagtgggagagttgcataccaacttgaataacagtaatattaataagttctgaataacccattaccatcagaccagcctctgggtctatttcttgtcttttagctttgtttatggtttctttgttagacagagttttgtttttaagttatagttgcagtcaaatttttcttcataactttgtgtattattaggtcagttctcctcaaattttaatgcactaacagtcacctggggatcttgttaaaatgcagattatggttcagtatgtcgggggtgggatctgagattccaagtttctaacaaggtccccagtgatatcatatgcctcttttggaagcacgctttgtgtagcaaagtttttattgttttgatttgtgtgtgtggtttttttgtttgtttgcttgttttgttttgcttttaagacggagtctcactgtgtctcccaggctggagtgcagtggtgcgatctcggctcactgcaacctccatctcttgggttcaagcgattctcttgcctcagcctcctcagtagctgggattacaggcgtgcgccaccacacccggctcatttttgtatttttagtagagatggagtttcaccatgttgaccaagctggtcctgaactcctggcctcaagtgatccgcctgcctgggcctcccaaagtgctgggattacaggtgtgagccacccccccggcctgtggtagcaaagttttaagtagtgttttagggtgtaagtatattcctgtatgtttgctgataatattgttactttttttttttttaaacggacagggtctccctttgttacccaggctgaagtgcagtgactcaatcataactcactgcagcctccaactcctaggctcaagcagtcctcctgccccaacctcccagatactaggactacaggcatgaggctatcatcttgtttttgtttttgtttttgttttttttcttgaggcggagtctcgctctttctcccaggccggactgcagtggtgctcttttggctcactgcaagctccacctcccgggttcacaccattctcctgcctcagcctcccaagtagctgggactacaggcgcccgccaccgtgcccggctaattttttgtatttttagtagagacggggtttcactgtgttagccaggatggtctccatctcctgaccttgtgatccgcccgcctcagcctcccaaagtgctgggattatagacgtgagccaccgtgcctggcctatcatcttgtttttactttttatctgcattacatgtgtagcaaggctttgctctgggtttgtgatttttcccttccccacaatcccctcaatcaaagattattttaataagtcgtaatagtggtagtactagtagcaactatgaaatttcttttagagtacttttggtggaaaggggctgtgatattaaataaacaagatggggtaattaagattccaaaaagtctgtgtcatttaatcatacttgaagaactaaatgtttgtgtgagtatgtgtgtatataggatgactcaagaaatacaataagttccctgtcctcaagagttttaaacttgactgggaaacagaacatacacagatgaaatgtgagtgatagttataaaccagtgtgttaaggatgaatattaagatgcaggtcaaaagcatgattgctgtaatatataaagtgtgttcagagcagacctttattgctcaaggaaatcttcctgaaagaggtaatatttaagcctggcttttaaagggtgtggattactaaagaaggatttactaatggtattcgactagtgttactactccctgaaataatctttgatttttttaaaagaaatatattagagaattagcaagcccttaccaggggcgtgaagggtgcaaaaggagtctgaatggcaaacagctagtctgataatgccagttgttgtcactacaggtgtacctggtgtgagtgttctgacattcagggccaagtgtatcatacttactctgcaagattaactgtgattctcttataacagagtgaattcaatgtgtacagtcaggaagtcattactgtccttggggaaattgattttatgcttgagaatcttcctgaatgggttactgctaaaccagttaagaagaacgtgctcaccatgctggatgaggcctatattcagccacagcctctgggagtggtgctgataatcggagcttggaattaccccttcgttctcaccattcagccactgataggagccatcgctgcaggtctggtgccaccttatgtctatatacctttttagggaggcttattttctcatattaattggaaattaaggatagtggctaattaaatacatttacttggtgatttgcctttgtttacaccaccagtgtactgagaattcatacataccatacatatttttaaatgggctgctgaggagatttgtgtggctatgttttgaagcacctggggaatgaacctgtgggagtgtaaagatgtgtgagtcagcaggcccaggagtttggagtcaggcatccatgttctaatatggtttcagttgctggctctggcttcggatgaaccatttgattctgtctgaccagtttcttcattcaaataaagactatgagagtaatgctagcttgggtatatagcaaatgccaggagattaatttctcactttgcaggatccagatagagagatgtatgttgaaatggctcacttgcccaataattccagggcagagaggacaatctaagggcagaagtgggagaaaagcgatagaaagctggaggagtgggaaaggctgctggaacccattgtcagtgacctgaagatgaggacagctaaggagttagccttagaagagaaagtgagatgagctcttatgctaattatgaggatatgcagcattgagagctgcagaaataattgggagtacctagcctgttcttcccactgaacatcattttggtagctattaaagttaaatattagatgatactgttctactttttactttatttaggaaatgctgtgattataaagccttctgaactgagtgaaaatacagccaagatcttggcaaagcttctccctcagtatttagaccaggtaagaatttcttgactcatctccaacatatgtgtttactgtggaaaacacacattttattttcttgctattgcatgttattgctggccggggacccaattgcagtctctttaagccttcaacagttggcttagcaaaagaagttcggttccaaaatacacggagtgtattttgtgtggagtcacccagctcttggggttacacaatatatgtaggcccatggcttcatgccaaacagattctgtgtttgtctgggatttggggttaatttttgagctaacatgattttaggtgttttcatttaatggattatttaatgagggactggtactgtgctgggtgctgacatatttctgttactaacaatctcttttgttctaacaaaatgtacttttctgtgattatataagagtactttttttttttttttgagatggaatcttgctctgtcacccaggctgtagtgctgtggtgtgatctcggctcactgcaacctttgcctcctgggtgcaagcgattcttctgcctcagcctcccaagtagctgggattacagacgtgtgccaccatgcccagctagtttttgtatttttggtagcgatggggtttcaccgtgttggtcaggctggtctcgagctcctgacctcaggtgatccgcccagcttggcctccgaaagtgctgggattacaggtgtgagccaccatgcccatgtgtctggaattggtgggttctcggtctcactgacttcaagaatgaagccgcggacccttgcagtgagtgttacagttcttaaagatggtgtgtccggagtttgtttcttctgatgttcggacatgttcggagtttcttccttctggtgggttcgtggtcttgctggcttcaggagtgaagctgcagaccttcgtggtgagtgttacagctcttaaggcggcgcatctggagttgttagttcctcctgtctggagttgttcattcctcccggtgggttcgtggtctcgctggcctcaggagtgaagctgcagaccttcgcagtgagtgttacagctcataacggcagtgcggacccagagtgagcagcagcagcaagatttattgcaaagactgaaagaacaaagcttccacagtgtcaaaggggacccgagcaggttgccgctgctggcttgggcagcctgcttttattcccttatctggccccacccgcatcctgctgattggtccattttacagagagctgattggtccgttttgacagggtgctgattggtgcgtttacaatccctgagctagacacagaatgctgattggtgcatttacaatcctctagctagacataaaagttctccaagtccccactagattagctagacacagagcactgattggtgcatttacaaaccttgagctagacatagagtgctgactggtgcttttacaatcctctagctagacataaaagttctccaaatccccaccagattagctagatacagagtgctgattggtgcatccacaaaccccaagctagacacagagtgctgattggtgcatatacaatcctccggctagacataaaagttctctaagtccccacccgactcaggagcccagctggctttgcctagtggatcccacgccggggctgtgggtggagctgcccatcagtccagcgctgcgcgcctgcacccctcagcccttgggcggtcgatgggactgggcgctgtggagcagggggcggcgcccatcagggaggctcgggcagcatgggaacccaccaggggcggggtgggggccttgggcatggcgggctgcaggtcccgagccctgccctgcggggaggtggctgaggcccggcgagaattcgagtgtggcgctggtgggctggcattgctgggggacccggggcaccctcctcagcagctggcccaggtgctaagcccctcattgcccagggctggcggcgccggccagctgctccgagtgtggggcccattgagcctgcgcccacccagaactcgctctggcttgtgagcgccacgcgcagccccggttcctgcctgcgcctctccctccacaccttcccacaagcagaaggagccggctccagccttggccagcccagagaggggctcccacagtgcagctgtgggctgaagggctcctcaagcgtggcgagagtgggtgccaaggccaaggaggtgctgagagcgagcaagggttgcccgcacgctctcacctctcacccagcctataagagtacttctgctttcaaaaaagacatgtctgtggcatgaaaacatgccacacatacacaaaaagtgccctcctgaactagagggcagatcctcacactgacttaacatgctggcatttaagaatatcaagaactgaataaagaaaatgatctgcccaactgcgggtagttcatctgtctgagtcagaggttcttatgccttcctggggaggaagttatgatgccgcgaagaaattggcactgctgagttctacatgcagttgctacagggaggagtcttcatttagctttaagcgaaatacagcttaaaaatatcttacctgtattctgtacatcaacttgtgatggattgaggccagttctggttcttggaatgatatttttctctttgttagagccattttgttctaatagctgtgatgatccaatcaagaaagatgaaatggaagacagtgagatgtcaaggattgaataggacgtagaaccagaagatagaggttgaaggtaccgctttgcccctgaccaggggtaaattcttcaataactgactctgtccggataaggaggataataatgctctaccagcttcagttaccgtgttaggggatcaataatatatgctatgtagattaagccatagaaaagttaaagcttgaaacatttgttgggcagctgaaccatgaagtgaatgaaattaattcgccttcaagtggaaacatgagatccacaagccagcttttacttcacacttccaccttggagtcttgaatacctctctgtcttccttgcttgccatctgttctcttacttttgatgctgttattgtccaagatgttctctcttagaatagctggtaatgatagcacaatgcatagatgggctcagtccacagaagctacgtgaattctcccagtaacagatgaggaaattgaggctcagagatgttcagtagcttgcctaaggttgcataagctagtgagtggcagagcccagattcaaaccagatacacttcaaaagcaagcgctctcagctactgtgccggatataccattcattcagaatagcgtgggctaagcccactctgtgttgtgagacagagaacattcagactaagacatgcatgacctgtcctgtgggagccactcttcaccagaggcacttctgcacacacccgcgtctcatgcattttccctggtcaaattcaaccatttgttctccttagtgtctttgttgctgagctcatgtaaaaaaacactggagtctccagattagttctatgtgggttcatgcttcccagatgccatcggactgtgtgttctcctcttgtccttggtcagttccctctcccatccctcacagggactggtcttgacactctctgggttttactgaatgttacatgtttatgttgaagagattgctgatgttagacgttaggatttatttggcagtgcaagagtttgtgtttctctttctttgaggatctctatattgttattaatggtggtgttgaggaaaccacggagctcctgaagcagcgatttgaccacattttctatacgggaaacactgcggttggcaaaattgtcatggaagctgctgccaagcatctgacccctgtgactcttgaactgggagggaaaagtccatgttatattgataaagattgtgacctggacattgtttgcaggtgagtctggctctctgattttctgaggttttcccagcacaatggagacttttcctgacaatgttactctttgtacttgaaccccataccttatggctccaagatacattattaagctttggtggttgatgtcctcaagagtaacaggagtctttcactgtctcttggcgccactgtcaaaaatggtgagctgtaagtcctgacatcatgtggttgtccttaggaattttaaaaaagttatatctgttctcaagattacagctagatctagcaagaaattttaacgttcttctggccagtgatctgtgaagtacataatccaaagtattgtgtgtgcctaataaaatctttaaatgcccatttgagagggtattatgctgatatcttaactgagatcctttgtgggcaaaacaagtgttcctcattttttaactgtgaataacatcttgcatctgaaaattagaaaataagaggtttcaggttctctctgctaaatccggtttagctactaagaagtgccaaatcatagaactgactctgtgctctgggtggtgtggctttctctgcccttcagagattccaggtcagggttccaggttggcttcctaagtagaaatccatttgtcaaaaccagacaccctcagttagtgaatgtttagggcatgggtttctgcccatgcataggaaaggtcttcccaagtggggcagggctccacaaagaggaggatggccttggaggctggctgacatcctgctttatacctgaacatcttgcaggcagagccaaaagccacaaccaggagagtctgtaccgaactctggtcatccaggactttcctttggctggactggaagaggggaaaggacattgggaggctgtttctcctcttttcctgcagcaggcaatggcttcactgtttaccaagtactgtttgccgtgagctggcctgagaacttccctgctatgtaaaatattccacctcatttggaaaatactttctaagttccaaacaactgatttagaaatgagtttttaacttttttataaaaattgccagataaatatatgaatctattttagttgcaagacattcaaacaacacaatgtaacaaatgaatatttgactgaattactgaattatatagctgttctggatgttttcccctcagacgcataacctggggaaaatacatgaattgtggccaaacctgcattgcacccgactatattctctgtgaagcatccctccaaaatcaaattgtatggaagattaaggaaacagtgaaggtttgtattaaaaacatctgattccactgattttaataagataaggagtcaaattaactattcgcaggcagcatccccatttgtttctcccttcaggaaaatttcaaaatcatatgtgactcagtgaacttattgactaatatgaaaatgctatgtgtaccatagaatatatgctgggagcaaggttgcattggtgttaaatctacttaaactgtctagttgatttgttgatgattagttgtggcatatactttttttaaaaaagttaaataatcgtgtgtccgtggttttgagggaatgttgccaaccctttaggtataatcagagagactctttggcatattggccattgctgctgaaggttatcagtttttgtgtatgtagagggcctagggtggccagtagtttggaggagtgacttaattaaataactacttacagtataccctttatataattaacaatctttcagcgtgtttaaagtaaatatttgcagtgagggaaccaaggaagactgcatgtagagtcctaagccaagacttgaagaaatataggatttaagttggtagaaaggaatgggggctgggcacggtggcttatgcctgtaatcccagcactttggggggcctaggggggcagatcacttgaggtcagaagttcaagaccagcctggccaatatggtgaaaccctgtctctactaaaaatacaaaaaaatcagccggggatggtggtgcatgtctgtaattccagctactcaggaggctaaggcacgagatttgcttgaaccctggcaagaatcgcttgaacccgggaggcaaaggttgcagtgagccaagatcacgccactgcactccagcctgggcgacagagcaagactctgtctttaaaaaaaaaaaaaaaaagaagaatgggatgaccaaatgaccagtgtgactgagttcagcagtgggtgaggatcattaacccctcagatgaaagaaattattggagcagtcactgtttactcgacagatgttaattgagcactaaaaggaaggatcaaaaacaccaaagagtaatgcatgtgatctgaaaatgaaaattgttggccagacatggtggctcacgcctgtaatcccagcactttgggaggccaagacaggttgatcacttgaggtgaggagttagagaccagtttggccaacatggcaaaacccatctctactaaaattacaaaaattagccgggcatggtggcacgcacctataattctagctacttgggaggctgaggcacaagaattgcttgaacccgggaggtggagcttgcagtgagccaagatcatgctactgcactccagcctgggtaacggaatgagattttatctcaaaagaaaaaaagatatgaaaattgtcgccgttgtggtggttcactcctgtaatccgagcactttgggaggctaaggtgggaagatcgcttgagcccaggagttcaaaaccagcctggtcaacataatgagaccctgtgtctacaaaagaaaaaaaggttagctgggtatggtggcacatgcctgtagtcccagctactcaggaggctgaagccagaaggatcacttgagcccaggagttcaaggctgcaatgagccattattgcatcactgtgctccagcctgagtgacagcataagactctgtctcaaaaaaacaaaaaaagagaaaattggctgggcacagtggctcactcctgtaatcccagcactttggaaggccaaggcagacagatcacttgaggccaggaattcaagaccagctgggcaacgtagcaaaatcttgtcgctacaagaaatacaaaaattcaggtgtaccggcgtgtacgtgtggtcccagctacttggcaggctgaggtaggaggatcgcttgatcctcctgggaggcggaggctgcagtgagccaagaatgtgccactggactccagcctgggtgacagagtgagaccctgtctcaaaaaaaaaaaaaaaagagaaaattatgtaccaggaagttcaggacaatagttcactatgtgttccaggcagagtaacttgggggatgaggtgctagggtcttgacatggaaattggactatcatttttagtcataggactaaaaatggatccagatgagcacatgaagggagagttgcccagattcagggtatgtgggaagagagagtggttaaagatacttgtgagattgaaaatatttgggaattggagaatgcttagttgagtgtggtgatgaattcaatttcaaaggaataagggcctctgcctccctttgaggcatttatactcttaacacagtggttctcaagctacatgttaccctagtgagccatttaaaaacaagtttgcaagccttaccctccaaagattcagctcgtctgaggcctccaggtgattctatgatgcattcagcattgaaaactactgttggtgactctcgagtcagagcccaggcacatgcattttagcaagctgcaccagtgattccgaccacccagacttgagaattgctcttggtagaggttggatgaacaatgttcattttgatttgggatgaaattgggaactctcacaaggctttgaagtgatgcagcaattcagtaattttgtttgttttactaagtaaatattgattgtatgattattgacgttcttttaccttggtaatttaccaaagctgtattttgatccttcgggtggtttcaccatcatgtgtaagtggtggaaataccagttcaaagaagaccaaaacaacaaagtggagcaaagattggcaaatggtttctgtaaagggctagatggtaaatatttcaggctttgcagatgttagggtctctgctgtaactaccgaacttactgtagggggaaagcaggcacagccaatgtgctaacaaataggcaactctgatgcagagcaagacttctttccccagcctgctcccactgtcagccccaggaggtgaaggcctgtgggtggactctaagagatccataagaacctttggaactatggacaatgacagatctctgtgtgtgtgcatgctttattttctggtcctcgacctgccaaaaagctgaaacttgctactatcatactactgttaaattacttgaggggtggggtgttagattctgtgaggatataaaaccagattgattttggggcatggctggattttgtacttactgaaattgaattgtgggtctttgtgacatttatatactcctgttgttttaaataggaattttatggagaaaatataaaagagtctcctgattatgaaaggatcatcaatcttcgtcattttaagaggatactaagtttgcttgaaggacaaaagatagcttttggtggggagactgatgaggccacacgctacataggtaatggaaattctccttttcctatgggaagatggcaatttggcagtttttgctgacactacttattaacactagataaactattaaatatatagcatttaattgttaaagtactaaatcctgctttctggtatactgtacctgtagcttttgttataaactatttaaaatgtctgtgtttctgtgtattgaatgatgccaccagcgttgctccagttgttcatatttacacataactccttttttcctcctaacaatcctgagaagcagaatagaacttgatgtaattatctgtagtttgtggatgggaaaacagcacaaagaaggaaatagcttggccactattccacaattaaccagtgacggtaccattccagaaataatgttttggtccatcatgcttgaccttattatttgtgtaccttctttgtgctttttcttctttgccttgaatatgtattactttgaatgttaagcacatttttctacagtaacatataaggtgacagaaaaattagacacattttgctggcaaagaagctgcaccacctagctttacttatcccctttatcagataagatgctataagtcaccaaaaaaaaaaaaatcaactttaaaaaaaaaaacttaaaaatgaaataataagcagaattgattctcttataattagcagtcccgaggttctcctgagctagataattcagtggccccgtggtaccatcaaaaaaccctgattctttgtactaggatgcaaaagaaaacaatccttgtgccttctatctctcttggtggcagcccagattgaattggggaatacatctgtagaaaaaagagaaaacagactctacttgtttcacctctctgttctcccatcctcagcatgtccacattgcctatttctaggctaatgaatggtaagaggaaggggctatcctgattagcttatagactaattaggactttcccctgacttcgagctgggatcatcttacctgagcatggctatgcagaggaagtagacactcagcccaaattgtttctctgacctgaggaagatgtgggcaatggatttggagtggcagtttatataccccctggaagtggtgctgcaagaagctgtccccagccacattgccaagataacctattagaaactgggggtaaaggaaaagtgccaacttgttattgtcagatgacttctcttttggttgacgagccagtttcttacttacagcatcttttggagtactgctagttggtgacttacattggcagcagatgctgggacactttgtctagcctccccagcatctgtttcaccctcctttcttgtgcctcttccccatggtagatggaacagtggactaaggtttagggaattttgaccatttaagtctgttttcttaatctgtctaacagagttataataaaggttaatgagatcatatatatgaaagcactcgagttaagaaaaatagtattgatttgattcacagaggagctgtctttgctcctagaaagacctgtccattcgagaccagcctgacccaacatggagaaacctcatctctactaaaaatacaaaactagccgggcgtggtggtgcatgcctgtaatcccagctactcgggaggctgagacaggagaatcacttgaactccagaggcggaggttgcagtgagccgagatggcaccattgcactccagcctgggcaacaagggcgaaactccatctcaaaaaaaaaacctgtccacagaaaaatgttaagtataatctacagttaaatacatgcatggctgtgaacagggttcaatgtgaaaaagatatatttgagtgtgtatcgttcccttggtttgcacaagtatccgcagggttgtgattcacaggctttggagacattgagtatgtgcacagttcatccacgtgctcaggatttttcaatagatatgacttgggtgggagagggaaaggcatggataagtgacccaatgaaagagatgtaatatgagagttgtgcatttttgtctaataagcattttcattttgtttattttctttttagccccaacagtacttaccgatgttgatcctaaaaccaaggtgatgcaagaagaaatttttggaccaattcttccaatagtgcctgtgaaaaatgtagatgaggccataaatttcataaatgaacgtgaaaagcctctggctctttatgtattttcgcataaccataaggtaagctttagagagaacagctagttagcataagcaactgtcaagagtcatgttccttctttgctgtaaaacaatgcaaaaaacaatgtgaaacaatgatggtttcttttgtgtcatgtcagagtccatccactaagtgaggttgtgttccgaggttgctgtcttggttaatgagactctggggttatcacagcatccattcccctcctccctcgggttagatctgagtctgcagggttgagtgtcacaaggtttttgattcacaaacatctcctgtataattggaagacttatatgtgccagcattaaatgcttttctgatgttaatccacagggcattgctgaataacagcctgcacaaaatggcattcacacccactgtgtgggacaaagaccccgacactgtcacataaatggttgtgatatgatggattttagtttctaacatgacgctagcttcttgttagagtggtggaactgcatcacctggttgagcagttctgccactttctgcatggctcactcattcatgtcactaggtgaccagccgctactaagagaccatggcccaaatgttttctggagagcttctgatggtaatgtatagatagtcatgtgacagcttttggagcttgtgagactattgagatacagatagctacaggtatttgaagtgagaccaaatgtgtggggctcagtaaagactgggttattaacaaaacaatggtttgacatttaaaaccatggataatgtgggcaggaaggaaccctgaagccgaaagtaggctggccagggtataagtcaggtgtggagcacttcccagcagtgggtcacccgaggtcactatagtccagacttgacgtttgccatgaacaattgtcaagggcttgctggcacccaagggtaaatgacgtttactagtcaagtgttcttgtgcttttctgagccttaggccaaacaaccatttatttcttaaaaaataggatgctaaatctaaagtcttaaatatttttacatttcataaagactaaataatacctattaatcatgtgttataatttaaagcagagataagaaagaaataataacagtttttaaagctggaatatagtctaagctgtccccttttaaagagtcttttgctgctgtgttggggagtacaactccaggttgtggctgagtaggcccagaggtttggagctgcctccttttgtgcactagatgtgtgtctgagaagttgggtatcagtcactttgctaaattaaccagttgagattgtttgtctatctggcatggtgtccccaaactcgagaattttcactgacacaaagccagaatgtgcatgctttgagcacataactgagcacacagccctctgtgtggtggggccatgagtgttccctaaggggcaacttcactgacctggacacctttggtctgtcctcagctcatcaaacggatgattgatgagacatccagtggaggtgtcacaggcaatgacgtcattatgcacttcacgctcaactctttcccatttggaggagtgggtgagtcttattttctcctgcttgtagtagatatttcaaaagcaccaccatttcatgagtggattgtatgggctgctgaaatagccagctgttgcgtaccctgattgtcctctcctgagggagaccttttcctggtcacccagttgactggttttcctgcttccccacccacccctccagcatagggcaaatgtcttgtcactctctttctgtcagcagcactgactgaccacagctttgttcacttcgttgattttgttatcctgccacatttaggagatttgggaaccaagaatcaggtctcaaattaattaagaagatctctcttcgtgtgtgtgtgtgtgtgtgtgtgtgtgtgtgtggtgtgtgtgtttaatgaagtagcaaatgaaaggttcggaataccagggacagaaggtagaggggttttctaatgtgcctttgttttctgctcagttcttacctgcattgttccccagccctttgttgggaggagcagcctctccttgaattgttttgtgatttgagtaaaacgggactccccctgttctagagaggatgggcagaaagaaattcattccaagtgaagctttgtggacatagcctgatccttgcttttccctttagaacatgacctgcctgcctctcccacatgtgagatgactgactcagctttttatttctcctttgggacctaggctaggtgggcttttctactctctactagagctattacaaaatagccgatatgtaaacattctcataacaaaaacccaaccagaaaagccactgtcttaaagccctgttctatcctctccctttgtaataccgtcctaagtcagttgctccatgggatgcgatggcccagtttggcaggaccatctgttcctggttaaggaaaccttgtcctatgaccaaggagccttgacctatatagccacaggtccttgtctaggaggtaaacatattgccagcacccagcacagtgactgacatgagtgagggacaggcgggaagaggccaattggtaggtattgccagatccaaattggaaatggtggtggcttgtagagggtggtagcaggggagatagtggaaagggaagggggtatttttgggatcaagcagcaggattggctgatggagtgaatgttggaggagggggtgaatgagagaggatgactcctgggattttggctggagtaagtaatagttttgtagcccaaatgcttaaaagattggactctgttgtctctgttcctcagctcaccacataggatcctggcatccactgtgctagtgcagtaatcaactcggtaattgttccatatggtgtctccactgccctctaattgcaaatctaagtgacttgggttcagtccctgtcctacttgacaagatagcctgtggcatcattgactataccatcttatttaaaacaaaacaaggctgggcgcagtggctcatgcctgtaatcccagcactttgggaggccgaggtgggtggatcacttgaggtcaggagttccagaccagcctggccaacatggtgaaaccccatctctactaaaaatacaaatgttagctgggtgtggtggtgcgtgcctgtagtcccagctaccagggaggctgaggcaggagaattgcttgaaccagggaggtggaggttgcagtgagctgagattgcgccactgcactcaaacctggcaaacagagcgagactccgatctcaaaataaataaataaataaataaataaataaataaataaaaataataaaataaaacaagcaacctattatatacccacaaaaattaaaaatacaaaaagaagatgcaaaagaaaaaaacaggtttactctcttagcaaatttcaggcatataatacattattatagtggccatgctgtaaaaaaataaaaataaaaaataaaaacaagccttgacccccaaatgtaaaaagaatacaggctttttaagaaaacttggaaaagatagaagagcccaaagaataaacatttatattacccataaccccactatgtaaagataactggtatatgtcttgcacacatatgcacacacatatacacggtcatctgaatattctattcaaaaaggtatcatactatatattgttctgtaccctgtatgtgacagaatagtgtgacacttttccatgtcaatattcttgcatgtcataattttagtagctgcatacttttccatcatatgaatgtggcatatttatgtaaccaattcccagtattagatttttgtgatttcaatttttttggtattacgattcttatataatgtatctttatgcaatctctgattatttctttaggaaaaatgtctacaagtgtaattactctgttaaaagggcttatacaattttccaaattgaaaaaaatgcttttttcttctaattctcaaagtaatatagacacagtggcaaaaagtctaaacagttaaactttttaatattttggcatatagtttagatttttcttttttttttctttttatcgagactgagactccctgtcacctaagctggagtgcagtggtgtgatctcagctcattgcaacctccaactcctgggttctagcaattctcctggctcagcctcccaagtagctggaactacaggtgtgtgccaccaggcccagctaatttttgtatttttagtagagacacggttttgccatgttagccagcctggtctcaaactcctgggctcaagagatccacttgccttggcctcccaaagtgctgggattacaggtgtgagccatcgcacccagcctaggtttttctttagaaatgcttctctttaagacttttgatagatatttcaagtgtctttgcagatttctgccactttatattcccatgatcagtatatgagtgtttacttccttatatccccaattctggattattccattattaaatttctagacagaaaagggtctcatttcaatttgtactcctttgattattagtgagtttgaattttttttaccactctcatgaattttctatttatgtcctttgatatttttgctgtgttcacatcttccttattattggtatataaatagccttttttataagtaagaaaatcctcagtcctatctgtaatacatatccctttccagattttaatttttcttttaattttatctatgatttgaagcgtttatttatttagagacagagtctcactctgtcacccagggtggagtgcaatggcgcgacctcggttcattgcaacctctgactcctggcttcaagcaattctcctgccccaacctcccaagtagctgggattacaggcacccgacaccactcctacctaatttttgtagttttagtagagatggggtctcaccatgttggccaggctggtcctcaactcctgatctcaggtgatccacctgccttagcctcccaaagtgctgggattacaggcatgagccaccacatctggcctaagcctgtgtggctttttgttttttggtttccgatttggaaagtaggcttagaaaagctttccctatttcattattatataaatatcatctgtaggctgggtgcggttgcacacacctgtaatcccagcacttggggaggccaaggcacctggctaacatggtgaaaccccgtctctactaaaaatacaaaaaattagctgggtgtggcggcaccacctgtaatcccagctacttaggaggctgaggcagtagaatcacttgaaccctggaggcggaggttgcagtgagcagagagtgcaccactgtacctccagcttgggcaacagagcgagactctgtctcaaaaaaataagaataaaataaataaataattaaatattatctgtagtttccttccctccctccctccttttcttcttttcttttcttttttcttttcttttctttccatttaaccatggagttggccaagcatggtggctcacacctataatcccagcactttgggaggccgaggcaggtagatcacccgaggtcagaatcttgagaccagcctggccaacatggtgaaaactcatctccacaaaaaatacaaaaaaaaaaattagctgggcattgtggcatgcacatgtagtcccagctacttgggaggctgaggcagaagaatcgcttgaacctgggaggcggaggctgcagtgagccaagatcatgccactgcactccagcctgggcaacagagcgagactccatctcaaaaaaacaaacaaacaaaaaaaacaccctggagttcactttagaatgccatacgctgcatgatgtaataatttaccttttttttcccaaagagtaaactatgctggcaccattttttgaaataatcatccttataccatcagtactcaataaaaacacgtttgggtcattcttagggttttctcattggttgcattatctttctggtttgttttttccgtgggccagtaccacagtttcaattacagtagttgtacagttagctttataagtgacatttagtaagtgcttattgtatgccaggtactgcggttgaatccacgccttttcttttcttttttttcttgtttgagatagggtctcactctgtcacccaagccagagtacagtggtgcaatcacggctcattgcagcctcaacctcttaggctcaaacaatcttcccgcctcagcctcctgaatagctgggattacaagggtgcaccaccatgcctggctaattaaaaaaattttttttgtatagaggcggggtctcactgtgttgcccaggctggtcttgaattcctgggctcaagcaatcctcccacctcagcctcccaacgtgctgggattacaggtgtgagccaccgtgcccggtcaaatgcacgcattttagagacagacaactaataagtagtaaagccaagaaatgagccaaagttgtctggctccaaaacccacatattcaaccaatccagtagtttgctctttaggacacagtactatttcaatacctaaaagtaaaagctcctcattattactgtttttcgatgttttcttgcttgttcttatctaaatttatttttccagatgatctttggaatcactacctcctcctacttaaaacaaacaaacaaaaccttccgaaatcccctaggatttttattaaaattgatttaaacttaaattattttgggaagaatttatatctttaaaatgtggagtcttaatgggaatatgttatatcatctcttcatttatatagcccttttatatctttcaacaaaactttgtaatttccttcatgtcagttttttgctttttatttattttttgagacagggtctcactctgttgaccaggctggaatgcagtgtggcacaatcatagctcactgcaactttgaactcctgggctcaagcaatcctcctgcatcagcctcccaaatttttcccagtttcttactaccttggttatgtctttggctcgcccctcccttattctttttttttttttttttgagacggagtctcgctctgtcgcccaggctggagtgcagtggcgcgatctcagctcactgcaacctccgcctcccaggttcaagcaattctcctacctcagcctcccaggtagctgggactacaggcgtgcgccaccacgtccaactaatttttgtatttttagtagagacgggatttaacgatgttggccaggatggtcttgatctcttgaccttgtgatccacccgccttggcctcccaaagtgctgggattacaggcgtgagccaccgcacccggccccctccctcattctttaccctccctcagagttagggtttctcatggtcttgtccttgggtctcttctcacaccaggcctgcttcatgaatgattccttcctgcagcctggccttggtaaactgctccctggcctctggtcacctgtgtcttatatcacacatgccattccctctgcccagctcacactgctccgctttgtgcctgtcagtctgttgtacacacaatgaattagagaaatgaaactgtcacagagcatggctttgtggagggcagagatttacacttgcttattatcatccagctgtgcaaccttgttgccctgtcttactttccacaggctttgagaaagcaagtgggtgtgtggggccatggatgaatgaagccacatgggatggtgggaagagagcacatatagcatttagagtctgatccaggttcgggttctggctttgccacttagcagccgtgtgaccctgggcaggttaactgaccctgtaagctccctttccctctctggaaatgaggctgctgataattcaccaagtgggattgtggtgagaattatcttaagagaatgatttaactcttagcacagtccctggcataaatgagagccacagctctagaagaggtgcaagtccttgtcttgctcatggaaagcatcctgtttgacagggaaattgacttttccagggaagttggtaaggacttcctgaaaagagatacttcagctggcagagatgttcagtggggttcccaggcagcagggagtgcatgtgagctttcccggtcgttgttagacagaagtagcttgcatcatctacagtgaagcttgttttgtctgttccctttatttcaggttccagtgggatgggagcttatcacggaaaacatagttttgatactttttctcatcagcgtccctgtttattaaaaagtttaaagagagaaggtgctaacaaactcagatatcctcccaacagccagtcaaaggtggattggggaaaattttttctcttgaaacggttcaacaaagaaaaactcggtctcctgttgctcactttcctgggtattgtagccgctgtgcttgtcaaggtgagtccctataacccatgagtgccattcagtctggtcctggcctgatggctgccagatgcatattctagcaggactctacattaacttgtagagtctaagacagggtcagtgaaccacagcctgctggccagctacccgtttttgtcactgaagttattggaacacagccacacccacttgtttaatcatccacagctgctttcatgggacagtgacagagctgagtagttgcaacagaggctgaatggccctcagagcctaaattattacagaaaagtttgctgatctctggtctaagagattaaaacagcgtagaacttgattgcagaattctgagctgtctgatcaaagggttagccctttgatccttttggtattggactttccttgtcacttacagctttgttcttgaatgtgcatgaaatcagcttaccacagaggtgaaggcaagaactctggtacaacagctttggtgagggatattttattaggcttgagtttttttcctccaaagttcactacctgataaagtttatctttggtgattagtcattatagggatgggcttgcaaagaggccctcatgatagctgccttctcaaagcagtttgcgtattttgagatgaaagaggaaatccgtaattaaagttaagatggaatgaggaaggcaattgtgtctgtggtgccctcagccgttcaactgaggatataacattgaaaatattgaccatatcagtgaagaatgggcttggaaaaggcaatggtaatagttgtgtttatgttttgtttaaaatttgaaagggggccggcgcagtggctcacacctgtaatcctagcacttcgggaggctgaggcaggggaatcacgaggtcaggagttcaagaccagcctgaccaatatggtgaaaccctgtctctactaaaaatacaaaaattagccaggcatggtggcacgcacctgtagtcccagctactcgggaggctgagggaggagaatcacttgaacccgggaggtggaggttgcagtgagccaagatcatgccactgcactccagcctgggcaatagagcgagactccatctcaacaacaacaacaacaaaaatttgaaaggggtttggctcatcttacagtatcccagccttagtggaattggagataccagttgcatttgaaatcatttgggttttctcagaaataccaagctgtgctgaggagaaaggccctgttgatttttctggtagttcacagactgcgttggtccagtaagcagagatgaacaccagatttcaaaacccagccctgtctgttaagagtgaggtaggaactttttgttttctttctatatgtaaggtgggccaagttggggtatgttttcaagggttttttggtttgtttttgtttttgtttttgtttttgtttttatttttgttttttttttgctacagttggaggcttaagggttattgaaaaaagaatgggccgggcgcagtggctcacgcctgtaatcctagcactttgggaggccaaggcaggtggattgcctgagttccggagttcgagaacagcctggccaacatggtgaaaccccatctctactaaaaatacaaacgttagctgggtgtggtggtacgtgactgtagtcccagctactagggaggctgaggcaggagaattgctttaacccgggaggcagaggttgcagtgagccaagattgtgccactgcactccaccctgggtgacagagcaagactccgtctccaaaaaaaaagaaagaaaaaagaatgtttaacttacttatctctagacattttggacctgggcccagagtatcagggtgttaaaactccacttatccacaattttaaaagggtgaagtgacttgctaggaatctaagagaagtgtgcagaggcaatggcttagctgcgtccaggtgaagcatacatcatttcttggaaaagggcagctgagtgtgagcctcatttctcttccccttctactcagctctcctgggggaggtgccagctgactaattcagacttgtcaccatctaggcactgaactctttatgtcataatttaagaatatgttttttaaatcactaagtagttttgatttgttttcatttttaaaaaaaggtttgactttggaattcatggcagcaaatgtcgtgaaatcaaggtgtagtatacaatttaggggctactttctttgccttcctgaggctggaggtgtggtcggaagcttacttgggtctctggtcaatatctgtctcttttgttcttttcccaagacctcggttcctcagtttgataatgcatcttggtaggatagaatattttagcctcatggaaaatacggaggcccaggctgagtctgcattctccaatcttaccaaacccccaagaagcctccctcaggtgcagtgcagtgtgccaggcaggttcgagttcccaaagggtttggcaggcatgtttctctgtgagggtctagagaagcagcaatatataaaagaagcagcaatatataaaacctttagcagaaacaaaaaaatgtggtttgattcctggctcaatgaacttgggcaaggccttttctgagctctttcttgggcctcagcttgctcatctacagggtgagggagtaggtgtcagtgattccccaggccactttcaacccttccgctcaattctcattactaatagttgttaatatttctttggattcaatctggaactaggtagagatttggttttcttttccactttgctgcttttctgctcctttctgagcttttaatcctctttttatcaaattaccttttatttaaaataaatgactttgaatctgtactgtatatttacctgaatagtctatttattgtaattacatttttctgaaatggcttttatgtacttaatagtttccttattttgttacactcttggattttattttattaattaccttactagaattagaagggatttagagcagaagtattgtacacaaagtaaagttccaataaagcttataagctacagaaggcattgtgggagatgtgggttttaaaaggtcgagaaacataagaggttaatgttgataaatttcattaggcctttgacaactaaatatgacatttgaaccttgagattgcagcagcccttcctcagtcttcaataggaaggattaaattcagtactacttttgaattttagaaacaaaattgtataccagtttttgaattccatgtagagacttcagcttcctactgaaaatgctaggataataagttagtactctcatcttctgtctctactctgacattagctagttgacagtggacagaatatagccttcattatcacgttgtcttactcttattgttattgttgttttttgaggaagggcataatcctttggcctaaaccgtgcttcctaggcttcctagggatatgtagtccttttttgtacaatgcatgtagagtctcttcagacaggaggtgtctgagtcccagtgctgagcttgtgttgcaaggctggttgtgggtaggtttttaaagcagctgagtaaactgaatccttttttcctctctccaggcagaatattactgaagaatgatcctgttcaacctcctagtgcctctactgaattattcctcttttaaatggttaatgaaccaataatttttaaatcataccaaaaatagtaagaaaatatgcaaacactctgtgatcaaacttaaaagtcattgccattcatcattaataaaagttgccatttcaactacgtcccaacattccctaatagggtattcagggaacctgtcttaaattgtgcttatctaaatcttggaactttgagctaggggaggagaatgtattagactaaatacaaactgcggggttgtaagggagtctcagaacctcactgaatccttcactccagttaatggcactgctcacttcctgcctctgctgccaccatcactgtgtgaagctttcaagagcttggtacttcccagggctaccggcagtcctctgtagtccagagaggtgagattagatcttcttggttccctgtgaggtttcaggcactaaaactctatgtggggaagggaggggttactcctcctccaatgggactcaaggacttgacctccaggagtaggcccctggtcagaagtgccatctcaccagtggtcttcattcttcctcattcattctttatcatcctgtgttctgtttagttgcaacaatctcttgtgactaatgtcactcaaagcatcttgtaaatcctagggcttcctggaagttagttgccaaagtcatgcaagcatcacctgtcattcttgtgttggagttatagaattctacatcttataaaacctaactggcatttaaaaaatactgtggccgggcgtggtggctcatgcctgtaatcccagcactttgggaggccgaggtgggaggattgcttgagtccaggaatttgagaccagcctggacaacacagtgagacctcatctctatcaaaaaataaaaattagctagatgtggtggcatgagcctgtgttcccagctgcttaggaggctgaagcaggaggattgattgagcctgcgaggccaaggctgcagcaggctgtgattgcaccactgcacttcagcttgggcaacagagcaagaccctgtctccgaaacaaataaaaaatactgtaataaaagtacttataaacatactaatcctctttcaggaccctaaagttgcaggttagtaggtcttcaaggacaaatctgtaagtttcttatttctgtagtgcaagtaaaatttcactttttgaaactatagagagatccctttctgattagcctacagaacttaaagtgagggaaccatttcctctcacagacaaagaggcctgggatattaggactttggggtttgagagcatcatggggcagacagatggtggatggtctggacaagaagcgagtaagccactgcggttggtcatactgaagggaattgatggcaagaggatcccctgagcaagtcagaagttactctcatcagtcgttcatggtcacaacctgaggtactctgctgagtgggcaaggctgaagaagaggcctgtggaatgcagcattacctgctggacagagcagggcaggcagttctatgccttggagctcctgactgcagggactctgtccccacactcaaaaagactcagctcactcaatgagagaatgtgatttactttatagaacgtataatcaactttgttgaataatttgttctattaaggctgtctaaagtatgtgatgtcttcatcatagtatgaagtgttgaaaattaataacgagcctagtttaggaaaaagctgcttaaaactgtggctctaagagagtaatcataaaataccttagataaaattgcactatggaattttcattgagtatgtttaaattattggcttgtctactaatacacatctgcttcaaaatgaacatatttcataaaattggcatcaattttaatgacgctcctggtatggaacctcagatataccctattggagacaatcctttgatcataaattctccccaactataaatcattttatgtctttatcatagatggtatttgtcaactttttttttctcattttaaaattcttagctgagaagattttctcaaactttatgttctgctgtgtgtgttgggggtggtggttagtagctatagtaaataggtttttccagtggcatcctcctacccccagttgctgatctagaacaagtgtttctgtaagcatatttgtagaacactaatcccgcaagattttacacaaaaaaatggtcctgccaccagtcctgtataccactggcttgtaaagcacatcagcaaactaaaggacccaggtcatttggaacctctgaagtgctagtgtgtgcagctcccagacttccttgaccgcggagccgtttaccttaatacctgttaaccatggaccacacttgggcaaacagtggcatagagtctggaattgcttccatgatgactttgctgtgctctgttcctacttgttttgtgcccttatttatatcatgtcactactagaagaaaaagttcagtaagaacaagtatttctcaaagtctgtgataagtgaaaatgctgatggaatgaaagaactgtagaaaaggggaagaagggtgtatggacagccactgccctggtcagggtctcacagcacctgcatctgccaggagcacacgggttgtctggacagggcccactggtccccttctcagagcttcacagaggctttatgacagacttgagcagcaggctgtgcccaggaaatgtgtaatctttaatataacagtggtttttgtgattttatctgcagtgtcccatttgaagccatttacattattaataatagtgacaatccctggactctgactcgtgcagttggctgatgtcttctgtagagcagtccaagtcacagaagaaaactccagcttgaccagaacagaattgtcaagtctgttcagacccctctgagtgtcaccacaaggaatcagccaaagttctttttttgaggagtggttcaaagtgtccacctgcactagaccccattggtgtttttgcagggcagaccgtggtgtgtttgcatactggggacagccactcctggctttctatttccaagcttctttgctagtgcctggtggctaggatcctgaccgtgagccccaccatcagtgtggctgacgccgcccccagagcagccccacggcggatgaccagctgtttcactgatagtctgctggtaggagctgaaagggcgtgggcctcctctggagtcctgaagaagtccacgtggcactcagaccttgaatacgttgtcaaggtaatgccaggggaactgcctgtagccactgcggaagcaaacaggagcaaactcagcaggtcaggggtcagagggagagctttggccttggaatcgggaaacctaggttaaccacctggctgtgtttgttacacctcacaagggacgatgcctatacagtagaaaaataactgctttatctactttacaagcaagatcagaggaggagatatgcaggaaagcatcttaaactgtgaatttcacgtgcagataatgcttactactaggatctcatgaggagtgttcttgtcaacgcttggccctgtgatgatctgtggcttcaaaagcacgtgggaaacacaattaatcatgtcttaccgtattctctcatgacaacttacgctcccagagttttagctggctcactactgccctgatcaaggattagcccaggatggatgaggtcatggagacatcatctgtgtgagctttgggccatgtgcacacacgcctggcactcaggaccagccctggggcagagctggggccatcacttcatgacatggacactgggcacaaaccagagagatgtttgtctgcctgatggggtggagagaggtagatagcaggtgcccccccaaagccaatgagtcaagccaggctggctgacaagccaggctccccacaagttaaaagttggccttccgtcttgagcagagttcagtgggggagatcatgggctcttgaatctgacgggttgatgcgcagatcttatgtctggcctttacaagttgtgggatgagggaggaaatacctaagttctttcagcctcacttcctcatctgaaaatgggcatacatctagttgcctctcaaggccaaagacttggtgtggggcctggtacttgcatgcctgctagacaatagatgttgttgtcttcctggtgcttaggacatcattttcataataatgggaagaaaaatagcttgggcttgtacaatttccaattgcatgaggcacagagggcagacaagagcaacatgccactgacatttatatgtgtaccaaagtagaagcagcggtgacagtattacctgaagataggactgctttctcaggcccaggtctggttgcagtgctctctgctctctgctgctgctgccggcctgaatgtttcttagcctaaaggagaaagaactcaattgggtcaacctgccagctcaacagttcaccccttcactgctagcctcgcattctctgtttttaaaacattgcaagctgaagcagcatatatgcatgtattcatagtcatggggcttttagaaagtatcattttaaggctgggcatggtggctcacacctgtaatcccagcactttgggaggccgaggcgggtggattgctggagctcaggaattcaaggccagtctgggcaatatagtgaaaccctgtctctaccaaaaatactaaaaaattagctgggcatggtggcgcatgtctgtagtcccagctactcaggaggctgaggcaggagaacctcttgaccccaggaggcagaggttgcattgagccgagattgtaccactgcattccatcctgggcaacagagcgatactccatctcaaataaataaatgtatcattttaaatatctgtttatccagcatcttaagtgtcaggatgactttttctgtgcacaaaggcaaaaccacaccctgataggattcagggtctttgagagaacactgcttctgtgctctgcttgcagacttgagttgtgcctttgctgtgcctgagatgcaaaggctgccctgccctgtttaaaaaggacatcaaagaggatggtgggcagggtgattttatgaccccttccaaagtcaaggcacacgctcgggggttcatctgggttcagactagtttgagttctttgcgtttgtttggttttccacagatggggctgtctaaggaaggtttttggttttgtttctgtttataactgcagagcatgcttcttatactggccaattacagtgacaggagccactgttgaggctcaggtggcccctctgtaatcccccacaaaacacctgcagcacgcctgtaatcccagcactttgggaggccaaggtgggcggatcacgaggtcaggagatcgagaccatcctggctaacacggtgaaaccccgtctctactaaaaatacaaaaaattagctgggcgtggtggcgggtgcctgtagtcccaggtactggggaggctgaggcaggagaatggcatgtacccagaaagtggagcttgcagtgagctgagatcgcgccactgcactccagcctgggcgacagagtgagactccatctcacaaacaaacaaacaaaaaaaaaaaacacctgcagcttataccacactgctgccaagttctgatgtgctctgggcatttctggctgagtagtcactccacctgctggggtcaggtgcagggtgtcttgtggccagggtcagctgacccacttacctcctctgcagcaagcttccagtccagccgggcagtataagcaacaaaggcagcagttgccaggaagacacaggccagcatgcccagccagaggcctggaggagacaagtgatgatgggaacaatgtccgacgaccacccaggcctctcccgacttcctcacaccacatacccatgattctcattctgaccacaaaggtcagaaggatgcccagtggtaggccgatgatgtaatatgtgatggcattcacagcggcaccaaaggcctgcttcccagttcctctcagaactccgccatagacacactaggaggggagacagaaatgggcaagagtcaggatgatgagactaagagcaggtgtcatgcagcaggcactgtgctaagccattcgcatggcattgcttcactgagttctcacagcactggatgggtgcccttatctccctttcttccctgagggtggctgtccaagacaggtcagatcacttgtccatgttacacagaagtaactgtgttttgaacacaaccctacagtactcaggcttcactgccacaccatatggcctccctagaaagtaaaggtagaattggtggccagcaaccagttggtctgggagactggactaacttcacatgatacagaggtggtgtgttggtttcctgtggctactgtagcaaattactgcaaatattgtggcttaaaataacataaatttgggccgggcatggtggctcatgcctgtaatcccagcactttaggaggctgaggagggcagatcacttgaggtcaggagttcaagaccagcctggctaaaatggtgaaaccccatctctaaaaatacaaaaattagccaggcaaggtggcactgtaatcccagctacttgggaggctaaggcacgagaattgcttgaacctaggatgcaccactgcactctagcctgggcgacagagcgagacttggtcacacacacacacacacacacacacacacacacacaaatttattattttattttacagttctggaggttagaagtttgaattgggtctcactgtgccaaaatcaagagcttgttccttctgaaggccctagttgagaatgtgtctctgctttttctagcttctagaattccttctgtattcattggctggtggccccacatcactctaacctctgcttccagcctcacatctcctctgactctcctgcctccctcttctaaggacccttgtatttacattgggcccacttggatgacccaggataatccccctatctccagattcttaatcacacctgcaaagtcccatttgccttgaaacactcacaggttctggggattatgatgtggacgttgaaacttgggggccattattttgcctaccatgcatggcaaacagtggttgttagcttattccatatgagacaagcagccctcacccactgctgtctgtgattatgtctcatctcaaagatgagaattgctctggaaaaagtactgtttatttcattagtctcattttcccaacgtgattccagatcttctgaactacaggcacagctcatccttggtcaggattattggccaatagatatttggttatttttattttgttcctgtgagaggtggggagtattttgtggtttgtacacatttgaacaaagaggtaatgcactggggttaggagatgtatgcctcttgaactttgtaatatggtatgtatatttctggttattatatgtcatggcatgatcttttttggctaaagacttctcccaaattatgattgatgtaccctggaccagtgtttctcaaatggggatgacaaattctgggatgtttttgttgtgacaactgtgggggtgtggtgggggaaagtgttacagcatctagtgggtagagaccaaggatgctgctaaacatcctacaatgcccaggggaccgccctccccccaccaaacaaagagttatctggtctaaagtgccagtagtgctgaggttgagaaactctgatttagagtattgtgaattaaagtggcaatttcagtggcaggaagggccagtggctttgctagcctgaggttgtgggcctgtttgggagaagccatcgaccagtggactaggcagggatttaagagggagtttgatgaggtaaaacagccaagggaatggggaggtactggtaagttctctacatatcccaagctgaccagaggctgtgcatatggtgtagcagagaccaagcctcccacatgttcctggacaatggagcctgtccacatgggctgaagagacccgtagtacccagaagaaagtaaaagccaggactcacttgaaaacagctggaactctgaatacgtctctagcccacacatggatctgtcagcagagaatggaagctttgctagctatcagaggtgttgaacacagtctctgaccagtaattggctgaacactaagctctgcagacatttttaatcctagaaagaacattttaaactagaaagctagacttaaaaaaataagaacaagggggaaaaaactgagcaagagacatcagcagctgtacattgtagaggagacaggagtcacagaatcagtctaagcaagttacttaaccaacacaatgacattccttgggtctcacatgcagcattctccaggatagacctgcggtaggccacaaaacaaatctcaataaactaaacttaaaacaatcttttttaagagatggagtcttgctatgttaccctggctggtcttgaactcctaggctcaagtagtgctctcatctcagtctcctgagtacctgggactacaggcacattccatcatgcctggcaaattttgaaagactgaattcatacaaagtatgttctctggccacaacagaattaaattagagatgcctgccagaaataaaaccccaaatatttggaaattaaatgcacttctaaaccataagtcaaagaataaatcacatgagaaatttaaaaatatttcaaacttgaaaattttgatgaacatcaaaatttattagatgcaactaaggcaatgcttagagggaaatgtacagcttcaaatgcctatattggaaagggagaaaggtctcgaatcaatgacctactattctaccctaagaagctagtaaagaagaacaaactatacctaaatgaagtaaaaggataagaatgtaaaagattagtgtgggccaggcatggtggctcacacctgtaatcccagcactttgggaggccaaggcaggaggactgcttgaggccaggagttagagaccagcttgggcaatatagcaagactctttctacaaaaaaaaaaaaaaaattaaaagttaaaaaataaatagataaaagattagtgtgaaatcattgaaataaacagcagaagactaaaacatgcatctattaaaaaaactacttttcgccctctccctctccctctccctcccgctcttgctctcgctctccatctccctctttctacggtctccctctcttgcggagcctggactgtactgccatgatctcggttcactgcaacctccctgcctcaggctccggtgattctcctgccccggcctgccgagtgcctgggattccaggcacgcgctgccactcctgactggtttttgtatttttggtggagatggggtttcgccgtgttgaccgggctggcctccagctcctagcctcgggtgaagtgcccgcctcggcctcctgaggtgctgggattgcagacggagtctcgctcactcaatgctcaatgttgcccaggctggagtgcagtggcgtgatctcggcttgctacaacctccatctcccagctgcctgccttggcctcccaaagtgctaagattacagcctctgcccgcccgccaccccatctaggaagtgagcagcgtctctgcttggctgcccatcgtctgggatgtgaggagcccctgtgcctggccaccccatctgggaagtgaggcgcgcctctgcctggctgccaccacgtctaggaagtgaggagcgtctctgcctggccgcccatcatctgggatgtgaggagcccctctgcctggccgccccgtctgggaagtgaggagtgcctctgcccagtcgccccatctgggaggtgaggagcgcctctgcctggccgccccgtctgggagggttaaatggattaagggcggtgcaagatgtgctttgttaaacagatgcttgaaggcagcatgctcattaagagtcatcaccactccctaatctcaagtacccagggacacaaacagggccgaaggccgcagggacctctgcctaggaaaaccagagacctttgttctggtgtttatctgctggccttctctccactattatcctatgaccctgccacatccccctctctgagaaacacccaaaaatgatcaataaatactaaataaataaataaataaataaactacttttcaagacatagtgtaagatataaatagaaacaacaaagttaagaaacagcaggggatgaagttaaagtttttcttaattttctctgcttgtttgtttttgcaatcagtatttagttgtcactagtttaaaaataatggattattggccaggcacagtggctgatgtctgtaatcccagcactttgggaggcaaaagcaaaagacctcacctgaggtcaggagttcaagaccagcctggccaacatggtgaaaccctgtctttactaataatacaaaaattagccgggcatggaggtgagcacctgtagtcccagctactcaggaggctgaggcaggagaatcgcttgaacccaggaggcagaggttgcagtgagccaagatcacaccattgcactccagcctgggctacaagagcgagaccctgtctcaaataaataaataatattgcaagcctcatggtagcctcaaatcaaaaacctacaaaagatacacaaaaaataaaaagtatactaccagagaaaatcaccttcacaaaaaggaagacaagaagaaaggaagagaagaccaccaaaccataaaataaataataaaatggcaggactgagtcctaacttatcaataataacatcgaatgtaaatgaactaaaaactctctagtcaaaagacatagagtggctcaatggataaaaaacaaaacccaatgatctgttgcctacaagatgcacacttcacctacaaagacacacatagactgaaaataaagagatggaaaaagatattgcatgcaaattgaaaccaaaagtgatcaggagtagtttatacttagataaaatagatttcaagaccaaaactgtaaaaagagacaaggtcattgtataacgataaagggggtcagttcagcaagagaatatcacatttataaatatatatgtacccaacactggagaacccagatatataaagcagatgttattagaactaaagagagaaatatatttcaatacaataatagctagagatttcaacatcccacttgcaacactggacagatcatccagacagaaggtcaacatagaaacattggacttaatctgccctagagactaaatagacctaatagatatttacaaaagatttcattcagctgctgcagaatacacattcttctcctcaacatatggatcattctcaaggacagaccatatttgagtcacaaaacaagtcttaaaaaattcagaaaaaattgaaatcctatcaggtattttctctgaccacagtgaaataaaactggaaatcaataacaagaggaattttggaaactatacaaacacatggaaattaatatgctcctgaatgaccagtgggtcaatgaagaaattaaggaaatttttaaaatttcttgaaacaaatgataatggaaacaacatatcaaaacgtatgtcatacaatgaaagcagtactaagagagtttataggaataaacacctacgtcaaaaagtggaaaaacatctaataaataacctaatgatgcatcttaaagaactagaaaagcaagagaaaaccaaacccaaaattagtagtctgtgtcctgtgaggccagccagaaacatagaaaagcaagagcaaaccaaacccaaaattagtagaagaaaagaaagaataaaggtcagagcagaaataagttaaatggaaacagaccaaaaaaatacaaaagatcaatgaaatgaaaagttgtttttttgaaaaaataaacaaaatagacaaagctttagccagatgaagaaaaaaaagagaaaagatccagataaaatcagaagtgaaaaaggagacataactaataccaagaaatgcaaaggattgttaaacgttactatgagcaactgtataccaataaattggaaaacctagaactggataaattcctagacacatacaacctaccaaaatgcaaccatgaacaaatctgaaacctgaacagactaataacaaataatgagattgaagctgtaataataagtctcctatcacttctcagccttttggctaagatcaagtgtaatcataagtctcctagcaagcaaaagcccaggacccaatgacttcactgcttaattttactaaacacttaaagaaccaataccagtcctattaaatctgttcaaaaaaataaaggagggaggaatatttccaaactcattctataatgaggccagtattatcttgataccaaaaccaaagacacatcaaaaaaaagaaaactacagaccagtatccctgataaacattgatacaaaaattctcaacaaaaatactagcataccaaatttatcatgaccaagtgggatttatctctgggatataaggatggttcatcatatgcaaaccaatcagtatgatacatcatatcaagagaattaaggacaaaaaccatatgatttcaattgatgctgaaaagcatttgatgaaattcaacatcccttcatgattaaaaaaaaaaactcaaaaaaactgggtataggaggaacattaacacaataaaagccttatacaacagacccacagctagtatcataccaaacgggagaattggaagccttccctctaagatctagaacaggacaaggatacccactttcaccactgttattcaaaatagtactggaagtcctagctagagcagacaagagaaagaaagtgcatccagattgaaaaggaaatcaaattatccttgttcgcaggtgatatcatcttttttgtttgtttgttttgtttttggagatggagtctcgctctgttgcccaggctggagggttcagggacttctctgcctcatcctcccaagtagctgggattacactgcactgcctgcactacaaagcctggctaatttttgtattttttttagtagaaacaaggtttcaccatgttggccaggctagtcttgaactcctgacttcaaatgatctgttcacctcggcctcccaaaatgctgggattacaggcgtgagtcactgtgccccgctggtgatatctttttttttttttttaagagagagggtctcgctgtgtcatccagactggagtgcaatggtgcattcacagcttactgcagccttgacctcttgagctcaagcagtcctcccacctcagcctctcaagtagttaggactacaggcatgcaccaccatacctggttacttttttattttagtagagatgtaccaccattcctggctaacttaaaaatctttttggagagatagggtctcactgtgttgcccaggctggtctcaaactcctggcctcaagcagtcctcctgcctcagcctcccaaaatgctgggattacagttgtgagccaccatgtctggcccagatgataggatcttatatttggaaaaacctaaagacccccaccaaacaactatttgaactgataaatccaacaaatcaacatacaaaaatcagtagcatttctgtatgccaacagcaaacaatctgaaaaatcaagagagtattcccatttacaatagctacaagtaaaatacttaggaataaacttaatcaaagaaatgaaagatggccaggcacgctggcttatgcctgtaatcctagcactttgggagtccaaggtgagtgggtctcttgagaccaggagttcaagaccagcctgggcaacatggcgaaaccctgtctccacaaaaaatacaaaaattatctgggtgtggtgacatgcacccatggtcccagctactcaggaggctgaagtgagaggatcacctgagctcaggaggtcaaggctgcagtaagccatgatcatgccactgcactccagcctaagtgacagagtgagaccttgtctcaaaaaaaaaaaaaaagaaaaagaaatgaatgatccctacaatgaaaactataaaacattgatgcaacaaattgaagaggacacacaaaaaatggatattctatgttcatggattggaagaattaatattgttaaaacgttcatactacccaaagcattctacagattcaatgtaatccctattaagataccaatgatgttcctcacagaaatagaaaaaataatactgaaatttatatggaaccacaaaagactcagaatagctaaagccatcctgagcaaaaagaacaaaactggaggaatgacattacctaacttcaaattatactacagagctgtagtaaccaaaacagcatagtactggcataaaaatagacacacagactaatggaacggaatagagaacccagaagtaaatccatgcatctacagtgaactcatttttgacaaaggtgccaagaacatacatgggggaaaggacagtctcttcaataaataatgccaggaaaactggatattcatacgtagaagaatgaagctagacccctatctctcaccgtatacaaaaatcaattcaaaatggactaaagacttgaactgaagacctcaaaccatgaaactactagaagaagaactttgggaaaactctccaggaaattgatctgggcaaagatttcttgaataatacccccaaagcacaagcagccaaggcaaaaatggataaatgagatcacatcaagttaaaaagcttctgtacagcaaaggaaacaatcaacaaagtgaagaaaccacccacagaatgggagaagatatttgcaaactatcaatctgatgagagattaataaccagaatatataaggagctcaaacaactctatagaaaaaaatctaatccgatttaaaaatggacagaaatagaaaaaataatcctaaaatgtataagatctgaataggcatttctcaaaagaagacatacaaatggcaaacatatatgaaaagatgcccaacatcactgatcgttagagaaatgcacatcaaaactacaatgagatatcatctcaccccagttaaaatggcttctattcaaaaggcaggcactaatggatgctagggaggacatgaagaaaagggaaccccccttggccgggcacggtggctcacggcctgtaatcccagcaccttggggggtcgaggtgggcggatcacctgaggtcgggagttctaaaccagcctgaccaacatggagaaaccccttctctactaaaaaaaatacaaaattagctgggcgtagtggtgcatgcctataatcctagctactcgggaaggctgaggcaggagaattgcttgaacctgggaggcggaggttgcagtgagccgagattgcgctattgtactccagcctgggcaacaagagcgaaactccgtctaaaaaaaaaaaaagggagcccttgtacactgttggtgggaatgtaaattagtacagccactgtggagaacagtatggaagttcctcacaaaactaagaactaccacgtgatccagcaatcctgctaggtatatactcaaaagaaaggaaattagtatagcgaagagatacctgcactcccatatttattgcactattcacaatagccgagatttgcaagcaacctaagtatccatgaacagatgaatggatgaagaaaatgtggcacgtatatacaatggagtactagtcagccataaaaaggaataggatcctgtcacttgcaacaacatgcatggacctggaggaaattatgttaggtgaaataagccaggcacagaaagccagactttgtacattctcactcgtttgtaggagacataaattaaaacaattgaactcatggagatagtgaatagaatgatggttactagaggctgggatggatagtgggagagggaatggggatggttaatgggtacaaaaatgtagttagatagaatgaataagatctagcatttgacagcacaacagcgtaattataggcaacaataatttattatacattttaaaataaaagtataattggattgattgtagcacaaagaaatgattaatgcttgaggtgatgaaaaccccatttatcctgattattaggcattgcatgccttatcaaaatatctcatgtaccccataaatatatacatctaatatgtacctattaagataaataaacaaccagagaaaattaataaaaacaaaagttagttcttaagatccataaaattggctggcgcagtggctcacgcctgtaatcccagcactttgggaggcctaggtgggcagatcataaggtcaggaattcgagaccagcctggccaacatggtgaaaccccgtctctaccacagatataaaaattagccagatgtggtggtgggcacctgtagtcccagctactcaggaggctgacgcaggagaatcgcttgaactcggaaggcagaggttgaaatgagccaagatcgtgccactgcactccagcctgggcaacagagcgagactccatgtcaaaaaaaaaaaaaagaaaaagaaaagatccataaaattgacccacgcttaccaaggatctgatcttggtaaaataaaaccaaaaaacaaagagagttagacatagattaccaaaatcagaaatgaaaatgagagcatcactgctgaccataaagaagaaaattaaaggaaatatgaagagcaacttcatgcaaaggaattaaacaattaaggtgaagtgagtaaattcctagaaaggcacaaattactgaaactaacttaacaagaaataggaaatctgaatagacctataccaagtaaatagattgaatttataatttaaactcttctgacaaaagccaaagcccacatgaccttaccgatgaattgtattcaatatttaaacaagaaataatgtcagttcttcacaaactcttttagaaagtactggaggagagaatacttccaaactcattctgtaaagccaatgttacccttacacaaaagccagatcaagataacaaaaaataaaaattacaaatgttcctcatgaacacagactcagaatttttaacaaaatattagcaaaccaaatttagtaatatacagaaaatatatacaccatgatcaagagaggtttatccgggccaggcgcagtggctcatgcttctgatcccagcactttgggaggccgaggcaggtggatcacgaggtcaggagatcaagaccatcctggccaacatggtgaaatcccatctctactcaaagtacaaaaattagccaggtgtggtggtgcgtgcctgtaatcccagctacttgggaggctgaggcaggggaattgcttgaacccgggaggcagagattgcagtaagcccagattacgccactgcactccagcctggcgacggagtgagactctgtctcaaaaaaaaagaggtttatcccagaaatgcaaggtataacacctgaaaatcaattaatacaaaacagcatattaataaagaacaattaatgcaaaacaccatattaataaagaacaaaaccacatgattatctcaatagaagcagaaaaagcattccgcaaaatctagcacccaattatgagatatctcaacaaactaggaattagaagggatctttctcaacttgaaaaagggcatttagggaaatgctacagataaaatttaacacagaaagactgaatacttcgaatactttccccttaatagtggaatcaaggctcagatgtatgctctttacacttggattcaacattgtactggagagctgggcacagtggcttacacctgtaaacccagcactttgggaggctgaggagggtggatcaccttaggtcaggagttggagaccaccctggccaatggtgaaaccccgtctctactaaaaataataataataataataataataaataaataaaaattagccaggcacggagttgcgtgcctgtagtcccagctacttgggaggctgaggcaggagactcgcttgaacttgggaggcggagcttgcagtgagccaagatcgcgccattgctctctagcctgggcgacagagcgagactccgtctcagaacaaaacaaaacaacattgtattggaggttctccccaaattggaaagcagaagtaaaagtgtctattcacagatgacatgatcctacatgtagaaaatcttaaggagctcagacacacaaactattagaacaaggtcacaggataaaggatcaataatcaaaaaatcaattgattttttataaacatgaacaatctaaaatgaaattaagaaaacaatttcattcacagtagcatccaaagaataaaattctttgggataaatttaacaaaagaagtataagatttgtccattgaagactataaaacattgccgagataaagaagttctaaataactagagacattctgtgcccatggattggaggcctcaatattgttaagatgacagttctgtccaaattgatctatagattcaacacaattcttttcaaaatctcagcatgctttttagtaggaattgataagctgattctaaaatacatacaaaaatgcaaaggacctaaaagagtcaaaagagtttggggacagaaaagaacagttggtatattaatagtacctgattacaaaactccctgtaaagctacagtaattaagactgtcacaatggcatagcatagacataaatcaatggaacggaattgtgaattcagaagtaaaccactacatttatggtcagttgattttcaactgtgtttccaagaaacttagtactggagaaatgagtctttcatgtgctaacaaatggtgccaggacaattggatatccatatgtaaaaaatgaatttaaacccttacctcatattatacacaaaaatgaactaaaaatggatcagaggccaggcgctgtggctcacacctgtaatcccagcactttgggaggccaaggcgggtggatcacgaggtcaggaattcgaaaccagcctggccaacatggtgaaaccccatctctactaaaaatacaaaaattagccggacgaggtggcacacacctgtagtcccagctactcaggaggctgaggcagaagaatcgcttgaacccgggaggcagaggttgcagtgagcccagattgtgccactgcactccagcccgggtaaaagagcaagactccatctcaaaaaaaaaaaaaaaaggatcataaacctaaatgtaagaaagacttaacattaaaactttttaaagaaaacagaggagaaaatctttgtgaccttgggttaggcagagttcttatatataaaatagcaaaagcatgagccataaaagaaattaagaaattggactacattgaaagtgaaaacttttgcaactcaaaagataccattaagaaaatgattcagttagacaggaagaaaaagtttaagagacctactgtacaacatgttaactattgtatacttgaaaattggtaatagtatattttaaatgttctcaccacaagaaaattagaattatgtaaggtaatgcatatgttaattagcttgatttagccatttcacaatgtctaaacatagtgaaatgtttacatatatacaaacatagtggctgggtgcattggctcatgcctgtaatcccagcactttgggaggctgaggtgggagaatggtctgagcccaggagttctgtagtgagctatgatggtgccaactgcactccagcctgggcaacagagtgagacctgtcttaaaaaaaaaacaaagaacaaaaaaaaaaaacagcaaaaaaaaaaaaaagaaaaaatgtataccataaatatatttatctgtgaatttaaaaaataaaatttaatttaaaaagataagccacagcctgggtttgcaaatcataaagcttgataaaggacttgtatccagaatatataaagaactcttataactaataataaatgttatgggttgaattgtgtctcccacaaaagatactgaaattcctttttttttttttaaggtggagtttcgctcttgtcatctaggctggtgtgtaatggcacaaccttggctcactacaacttccacctcccaggttcaagcaattttcctgcctcagcctcctgagtagctgggattacaggtgtgtgccatcacgcccagctaatttttgtattattagtagagatgggggtttcaccattttggccaggctggtcttgaactcctgacctcaggtgatctgccacctcagcctccctaagtgctgcgattacaggtgtgagccactgtgtctggccaaaagatgttgaaattctaactctcagtacctgtgaatgttaccttatttggaaataaggcctttgctgatgatcaagttaagatggagtcattaaggtaggccctaatccaatatgactggtgtccttattaaaagagggaatttgggcctggtgcggtggctcacacctgtaatcccagcactttgggaggccgaggtgggcagatcatgagatcaggagatcaagaccatcctggccaacatggtgaaaccccatttctactaaaatacaaaaaaaaaaaaaaaaattagccaggcagagtggtgcgcacctgtagtcccagctacttgggaggctgaggcaggagaattgcttgaacccaggaggtggaggttgcagtaaggccagattgcagtactgcactccagcctggcaacatagcaagactccatctcaaaaaaaaaaaaaaaaaatagagagaatttggacagagacagacatggaaggaagacttgaagagacagggaaaagatgaccatctacaatccaagaaacccctgaggctaccagagctagaagagaggcccagaacagatccttctttagtgccttcaaaggaagtataagtatgaccctgctgacaccttgatttaggatatctggtctccagaactgtaagacagtaaatttctgttatgtaagccatccaatttttggtactttgttatggcagtgctagtgtcttagtccattttgtgttgctataacataataccctagactgagtaatttatgatgaacagaaatttatttggctcacggttctggaggctgggaagtcccagatcaagtgacaacatctgttgagggccttcttgctgtatcatcccaatgcctgaagggcaaaagagcacacaagaaagaggggaagggggccagactcatccttttgtcaggaaccgactcttgaaataactaacctgctcttaagataatgacattaaggccaggcgtggtggctcacgcctgtaatcccagcactctgggaggctgaggcgggcggatgacgaggtcaggagttcgagaccatcctggctaacacggtgaaaccctgtctctactaaaaataaaaataaaaaaaattagccaggtgtaggtggtgcatgcctgtagtcccagctactcgggaggctgaggcaggagaatggcatgaacccgggaggtggagcttgcagtgagctgagatcgtgctactacactccagcctgggagacagagcaagactccgtctcaaaggaaaaagataatgacattaatccttctcttaaaggtcccacctcgacagggcacactttgggagactgaggcaggagggttgcttgaggccaggagttcaagaccagcctgggtgacatcatgagactttgtctcaaaaaaacaaaaagacaaccaaaaaaagttctatctctcaacactgttacataaacatatgaacttcggaggacacattcaaaccaaagcacttagcaagcaaatacaaccagctaccaaatattatattttcatatttttaaaatttgttttatttattttgtagattgagacagggccttgctctgtcacccagcccagagtgcagtgatgcagtcatagctcactgcagccttgaacttctgggcacaagctatcctcccacctcagcctccctagtagctgggactacagatatgcaccactatgcccagcttttttttttttttttaatgttttgtagagatggtatcttgccatgtcaccaaggctggtcttgacctcccgggctcaagccaacctctttctttagcctcccaaagtgatggttttatagacttgagtcatcacacctagcctacttaatttttaaaatgggcaaaagactaaaatagaaatttcactgaaggctacatatgaatgaatgataaacacacaaaaaggggctcgtcattagagaaatgcacactgagaccacagtgacatagtagcatatccccactgggatggctgcaacaagaaaggaaaagccatccagcagcttgttttgtagatattgacaaactgattctaaagcttatgtagaaagggaaaagactcaaaacgcaacatttacaaagaaaagcgatgttggaggagtgatactacccaatttcgagaattactataaagctgcagtgatcaagacagcatggtaaagttgtccacaaggtcttgtctgttgcattatagtcaaccctaatgtctattaaatggctactgtgtttcagacactttcatacatgttagctcagttacttctcgtatcagtactttttttattatttatttttttgagacagagtcttgctctgtcatccaagctggagtacagtggcgcaatattggcttactgcaacctccacctcccggcttcaagcaattctcatgctcagccactggagtacctgggattacagacatgtgccaccatgcttggctaatttttgtattttttgtagagacaggtttcgccatgttggccaggctggtcttgaactcctgacctcaagtgaggacctcctttgcctcagcctcccaaagtccagggattacaagcatgagccactgcacccagccttgtatcaatactttatgtcagggttgattaaaaaaaattcttttaattttgataaaatacacataaaatgtgctgtcttaaatgtttttaagtgtacaggtcagcagtgttaagtatatagccagccctccatacccacagcttctgcatccgtggatgcaaccagccatggatcaaaaatatttgaaaaacaataatacaacaataaaaaaataaacagcatagcaactgttacatagcttttacattgtactaggaattataagtaatctagagatgatttaaactcataggaggatgggcataggttataggcaaattctctgccgttttatatcaggaacttgagcatctgtggattttggtaccttgcggggtcctggaaccaattgcccaaggatacctaggaatgattctattggtgaaagaatagacaaaaaagatcactggaatggaagagagagcccagaaatagacccatacaaatacagtcaactgattttgacaaaggagcaaaggcaactggagaaagcctagttttttttttccaagaaatggtactggaacaactggacatccacatacaaaataatgaatttagatatcctgttttacaaaagttaaaaccacagacataaaagcaacatgcaaaagtataaaactcctacaaaataatagaaaatttaggtgaatttgggttacaccgtgactttttaaaattttttattttactttatttttagagatgggggtctcactctgttgcccaggctggagtgcagtggtataatcatagctgactatagccttggactgttgggctcaagcaatcctcctgcctcagcctcccaagtagcgaagactataggtgtgtgccaaccccgcctccccgccgaccccctcccccagctaatttttaaaaacttttgtagagatagggtctccctatgttgcccaggctggtctcaaactccttggttgaaatgatcctcccacctcagcctcccaaagtgctgggattaccagcactggtatgctggcatgagctctactgcacctggctggcagtttcttaaaaagctaaaaataaagttatcatttgacttaacagttcaactcccagaactctactaaaagaaatgaaaacaaatccacacaaagacttccacgtgaacattctaaacagcattattgatgatagcaaaaactagaaacaacccaaatgtccatccactgatgaatggataaacaaaggcagtatttccatacaatggaactactcggtaataaaaggaatgaagcagtgacgcatgctgcagcattgatgaacctcaaaaacagtatgctaaggagaagcagccagacacaggactgcatatcataagaccctacttatatgaaattgttcatacagacagaaagcaatgcagtggattgcccagggcaggagatgggagcagggattaactacaaaacagtctccaggaaattctgcggggtgatggaaaactagatggtggtgatggttacataactccaaattcatttaaaatcactgagttgtatacttatatatgaattttatcatatgtaaattataactcactaaaagtttacaaaatataaaaataaggctcatggaaaatgtaaattaagaaaaaaccgactagccaggaggaaaaatgatgggctgcacatacacaagccctcaggccctggtaactgttctctgtaaacctgactcggagtttcttggtagccaagtgactagagaactactgccccctggaaggggaggcatacttaatttcttaagaaatgctgggccaggtgccatggcttatgcctgtaatcctagcactttgggggccaaggcaggaggactgcttaagcccaggagctcaagactagcctggacaacatggcaagattccatctctacaaaactttaaaaagaaaattagccaggcatggtagtgcacacctgtagtcccagctactcaggaggctgaggtaggaggattgcttgggcccaggtggtcgaggctgcagtgagctgagatggcaccactgcactccagcctgggtgacagagtgagacctgtctcaaaaaaaaaaaaaaaaaagcaaagctattcctagctttcaatttcaagaatgatttctcaggtgtggtctcacccagacactagagaaaaagtatgaatagtgtcttttaacagtatccaggccaggtgcggtggctcacacctgtaatcccagcgcattttgggaagccgaggcgggtgggtcacctgaggtcaggagtttgagactagcctggccaacatggtgaaaccctgtctctactaaaaatacaaaaattagccaggcatgggggtgcatgcctgtaatcccagctattcgggaggctgaggcatgagaatcacttgaacccaggaggtggaggttgcagtgaaccaagatcacaccactgcactccagcctgggcgacagaatgagactctgtctcaaaaaaaaaaaaaaaaaaaaatagtatcctatgacaaaagcaataatgggctccataaagtagtttcatttaatgttccttgataaaggccacaaatatgatgccagaacacagcccagagagggaatttctgctgaggctaagaacatgtggcccgagcttgtcgctttctgaatgcccggctatattcaaaaataaatcctagaatagttagcgaactggatggagtacacagaggcctttggaaatatcctccataaatatgatttctttcagtagatttgtaatgagttggtaattattatgcaagtgttttttccccaggtagggaaagggctggaatgcgccagtattgctaagtaagggcatatccttctgcagagctatgggaatgtatgcaaggggtgtgttcctgaagaattcacgtaactccagatgcaaagtaggagagctatgagttcaaattctgcttattaagcaagagtttagtgttttgggttttgttgttttcttgtgtttttaaaaaatcatagctgggcacagtagttcatgcctattgtcccagcactttgggaggctgatatgggaggatcacttgagcccaggagttcaaggccagccagggcttggaagataaacctggcagctcccgaggccagccatgcctccaccatgccagccttcctctggcccaggctagtgactcaggccaacgttggaaggcccaccaggagaggattccacctatcatagtgtgaccctgtctctacaaaaaatacgaaaatttaaaaattagctggatgtggtggcatgcacctgtagtcccagctactcaggaggctgaggtgagaggatcacttgagctcaggaggttgaggctgcagtgagccatgatcgcactgctgcactccagcctgggtgacaaagcgagaccctgtctcaaaaaaaaaaaaaaattacataattcaaatctgtgttaaatgacacctgtcctttagtgatcaaaggagcagaaagtccagttccttctgtgttctgggtgggctcgttcccttgtagaaatgtccctctgtgctggcaacaggatatggttgccattcagctcctggccagcctggggcacaggtcaatgtcatggtcccagctcatgaggaatccggaagaaaaagatttgtggctttacactgctgcaatttttcagttctttgctaatctgcattcacttttgagctcgtgtaaattgcagaagaagagggaagtcactgtttgaaataagaatggaactattatcagcaaatactttgggcacttactatacagttagcccttcatgtgtattaacaagttcatcctcacagccctgcgaggtcctggggagggcacaagtacataaatcatgtcccagggagtcaggctttggatcaaagtggtacttacacagatggcctcaaacacgtgaaagacactataaaccggcaagacctggctcaccagggcaatgacatctctgcagaagaaatgagaaagcattaagacacagatgtatcctttgagacccatttatatcccttctattccacaccccacccccacaagaaaaagctttggaatagaggtagttgccccacacaaatgtaactggcactgctagcccagagttttctgtgtctgtgggtcacacctaaaacttcagaagagcccccacaattttggactgcccttcaattagcctcttgtctatggacaggcactaaaggcctggggtggatagacagaagttggcttcctctcagtgagagccaagcctgggctcttcctgcttcctttgggcccagcactgagccaggaatgtgataaatctgaggacacactgggaaccactttgacattttccaagagtcagcacagaaaactgattacctactcatcattggtaaaaatatgccccagctgatttttcaggatgcttatcagggtgcccaggaccagggaaatgccaactggaagagacaaaaggtgcagcaatgacagaccccaagccaggaagcacccttgctcagatcagcaaagggctggcccctatgtcagtgcaagtcagcccagccctctgcaaccaggtgccttttgtcacaggccttcatgtcccccgcatctgaggcgttcatttgggctagacagtcttgtaggaagggcagtgtggaaaatgcttccactccagtggttctcagagtgggcggcacgctggcgcagcagcattagcatcacgtgggaacttgttagaaacagattctcagaccctgcctccgacctgctgaaccaaagcctgctggtgaggcccagcaatctgtgaccagccctccaaggggattccagcgcaggctacagcctaagaaccactgctttctacagggaagccggtctgagccttccagtctcagaaagcacagccatgatgtcagaggacatgagtggctccttctccagagtgggttggcagctgccaagctcatgggggtgctgggagggccaggcctgcagaaggactctggacagctggaaggagagtgctgggcaggaagggccgtcaaagagtcagggtttgctctaaggtaagtggtagaagccagctgtctccagaagagtcccagaatcacagcagcagggaaggagtgagtggggatggggagaaagtggtgggagggacgcctgctgctcagggaggggcagctgtcagcttatcagcagaggctgacctgggtcagatggcaggtccagcaggcttggaagataaacctggcagctcccgaggccagccctgcctccagcatgccagccttcctgtggcccaggctggtgactcaggccaacgtttgaaggcccaccaggagaggactccacctacctatgctgagcacgcccgagacggccgagcgcttggcctgcacagtatccgcagcccccagagccatccccactcggacacagaccccgatgctgagccccaagggaatctgggatcaaagataagaaagcactgtcagtgggcccaccctccaacccctgaagtcctgagccagcctgggccaagagggacgtgagcgggaaggcagagcagatctcaggcatgcagtgtaagaggcacgtcacattcttgctgctgacaatgaggcagggagggctggggctgggagaagggtgggggtacccccagtgacacagccagtcccaccaccacctgcgccatcagaagcagcacaggcaggcgggccttgcaaccgaaatcactgtgttgtccaaatcaaatgagtaaacagattttaaagaggtgactgtggtcttagtcccagaaaagctccctgtaagaaaaaagatatttcagcagaaaccacttgtaaaaataagaatctctaaattgattttgtaatgtagatttttgtgactcctttgcttaaagctggggtcagggataacatgcagatgcgtacccgagtgacatgggctgcataagcaagacgatggctgtgtctctgtggggagtagaggggaggtgggggctgtggtggaggagagcccatggccctgctggggacgctgtcacccagctctggccgactgcagtgtgcaggaatgtggcctgctgctcgatggaatgtgctttttttttttttttttttttgagacagagtcttactctgttgcctaggcttgagtgcagtggcacgatctcggctcactgcaacctccgcctcccgggttcaagtgattcttctgcctcagcctcccaagtggctgggactacaggcttgtgccaccatacctggctaactttttatatttttagtagagatggggtttcaccatattgcccaggttggtcttgaactcctggctttgtgatccgccctcagcctcccaaagtactgggattacacacgtgagccactgcgcccagcctggaatgtgcatttttaaagaaaatccaaaaataagattgtgatgtgaaatctcccaattttaaaatgatactaattaatttttaaaattccaacatctgtgagtgaaatatcacccttggtcgtcaggttgtgggcacctgtgtgtgagtcctggcgtaagctgagcagggtctggacctggtgggcacgagaggcccggggagggtccttcgggagacagagatagcttcaggtgacagcctgcccccctcctatgacacctccagccatcaggtgggggatgtggggaaggcacccctgcaggagccttaccatgtaggtcacagtggccacctcgtagatgacagcctgggcagagagatccaccacactgagcagccctagagaagaggcccgccgtgagtccggcccgcagccccagacacccagaccctgcgccgacaggacgctgctttgctttggggactcaggggctttttttttttttcttccttgagacagggtctcactctgtcgcttgagctggagtgcagtggcgcaattatagctcactgcagcctccacctcctggcttaggtgatcctcccacctcaggcccccaagtagctgggactacaggtggtgccaccacacccagctaatttttgtatttttttgtagaaacagagtttcgccatgttggccaggctggtctcgaactcctggcctcaagtgatccacccacctcggcctttcaaagtgcagggattacaggcatgagccactgagcccggctgattttgaagggcagattggtaacaatgacaacaaaaagacattcctgcctggccttcagcctgttaggaaaattctgcccagtgccccggaggcccctgcaggcttccctgtgtggtctgtctttccagatgaactcagggtggcagtgtgagggaggggacagagaacaggaccagggtccggcaactcgagttcggttcttggccctcccactgattttctatttgtggagttcctgtgttcttggggccccgttttctcatctgcaaatgcggggcagggcaggggttctcacattcaggctgcctggagtcctcacttcaccgagtgctctaatgagcacacacaaggcagcaggtgggagcctcacactggcaagcctggacctctgctcacacccgcaaaccaactgaatctctcactcctccgtgcctcagccacctcccacgggcacctgctctgcctggcccatgctgggattcaggcacaaaaggcccaagtctgcctcctggatgctcacagcctactggggaggcagaccagcaacagacggatcagccccgctgggcagtggtgttctctgggtccaagcctgagggcctggccagtgaagctggaagggggctggtgagctgccatcctggggagggggcttctgggatgggtgagccgccatcctggggagggggcttctgggctgggtgagccgcccacacgccattgcgccccccatcctcttccacgtacccatgaggaagctcccgatctcataggcccaccactcaacacagatcatgagcatgctggggacagccagggagaagaaggggccccagtcctgcaggcactggctggaccaacctggaaacagaggccccatgagctgacagcctgccctgcttgcccacctcattcctgctccccactgccaggaggcccctaaacccctttggctcttcctgctctggggcttagcaggctcaggcactgggcattttgcagagggaatgcagctggtctagagctggtgttggggcctacggaggaggaggatgcaggaacagggcaccaggctcacctggccagtccacggtgtggccccagggctcagggcatgggtgttggtccccactccaccacccaccactctgcaggctccatttccatctgaaaaccccaggccttatagctgccctgcctccctggggagttttcagaggcggcatgagatcaaggatgctgaagggaaacacaccacaggtgcactgggcaagcttggaaggggctcagccagggccctgccccacatgaggccccaggggcctgcagagctgttcctgaaatgcctggcaggagaaggtccttgtatgggattggctctcaagaggcagaaaaggacaggcaggcccctacacgcctgctgtttcagcaaattacttaacctccgtctgtcataatctcctctttgtaaaatggggctaatgaggtggggtgaggtttaaatgaattcaggaatgtcaggcaccccacgcactgctgacgcctggtattccacgggtgtcactgctctcaccgccatcctgagagcagaggctgggcaagaaagctccctgggccaggcttctgtgatggacccagcagggctctgcatcgtgacaccttgggtggagggactctgggcccttggggctggggaagcaaaggggaaggagggggccgtgcagggtcctgcacctcctccaacaggctctactgcaccctctgcctgctgaccaccctgccccaaggctagggcagcaccaccgctggcctgctcagcctcccagagcaggccaggcctcccacctgcccacgtctccaggtgcagcttcttcagcacaatgtagagaaggaggaagacggtctgtgcaaactgggagatgatgttggcataggcggagcccctgggtaaggagggagaacagggctgcgactgatgccaactctctgccaccgccctgcctgagagagaggtggctctggcggccagcccgtgtggggcaggcatggctctgctcttcccccatcctgggatcagactcaaccagggcccacaggcacctctggccatggtggctctaccaaggcagccgtgactacagtgtcctgggggccaccttgccagtgcccacttcacctctcctggtgggcttgggcaggagcggggagtggctgtcctctcacccaatcaagcgtcaaactgaggtccccaagggaccatcaggcccctccaactccccataaccctccacttcaggacggcacaggcagggccaggatggtgactgatctgtctccaccaggggtggagagctcagtgggcagtgtcccctgaccaggccccaccagcccccgggctcacctgacccccaggttcagcacagaaaccagggcatagttggccacaccgttgacacagttgcccaccacaccactgaggacttggggccaggtgatcttctgaaataaatgaaaactggccctgctaaggtgtgagtgagatggatggaggatggacaaacccggggtttggaatggggactcctcctcctgccccttcagccatccctgttgaggagttggaagaggctgggacgcacagcctctcacctgcctctgtgcgggaggtcaggatatggcaggtgggttggaagtgacccctttcaagagctggttcacagatggtggagagaaggggaaagccccaggcccccctcccactggaatagggcagtgtgctgggagaagggcctccccacacaccaaagacctgtacctgattttgcaaatattttgccagcagattgtaaagaaaaatcacctgtatgaaaagcaaacccaaacaaatcaacaataatgaccaaaactcaccaaatgagcattaacagacattcctttccaggacatagtaccccagattggggaaattacttcatcaaagtatgtctgggacctctcaggtgcggccaaagcctacccagccacctggactcatgctcgggcccagcctatggaagaggccccctcagggctcccttctgccacaggggagatgagcaggcatgctttggctcagagagagtactctttgcacacatgctcatagtgcacagtgcctggtaggccttccggctgctaagccaggcttccatcagcttaggaaggtgagaagtgacccaaggacctgttcacagaagggcccactttggttctggccttagagacaggatttgaaggtgtgacttcggacgagggaatggcaggtactgagacatgctggccgtgggcagcctatgctaagcaggttcaagaccctacgggggtggcgggcccttccctggctggggaggaccataggggagtgtacgtggcagtgtgtgtgttggggggcactgtacctaccctttctctcctctcttaaggggaatagaataggcatcaactgaaacctagcccagggcccttgtcccattccttcctgtagctcttcacttattttcagcatagtgtactgattaagagtacagagctggaatagaccgggtttaattcctggctctgcctcttctgagatgtgtgatcttgggcaagttacttaatctccctgagtttgtctcctcatctgtaatggggataataatagtgtgtgtgtgtgtacttaatatacacttaatattttacatacataaatattgcaaagttaatattgcaaagtgcttaccaaatgatatatgggacatttaagcattccaagtgttagccactaacataactatgttagtgttattagtcactattattggcaattaacttttgcagctgcattttatggaaggactttggcttgacaaagaagacaccacagtgacatctttacagggcatttccccccgacccagccccaaaaatcctggttgacaagatgccatcacctcggtctgaaaagccaaagtatggattatgtggaagactcagaggagaagagcagccctataagggggtttccgtaaaccagaaaaaaatctgtaaccagctaggccccaaaaaggtcatggcactggcctggcagagaggtgggtgtggctgggtctgctgggactgcacactgttgggacaccccaccttcaccctgacctcttccctgcccagctcccttgccccaaacattccccctggtgccatggaggctacactgtcagaaagtgagctgagcctggtagggctgtctagcacacagaactgccagtcgtaacaggcatcactaagctgcaagtcaaacagtgaagcactgggctgcagaagagacatacagatccccgggtcactggacatacaatcactgacctagatagatgtactgttgattaattaacaaattaatgcagaaaggagagaatatgtaataaatggtgttcaaaaaaattttagttggattaatatcttaaatgtaaaaatagaaaccctggaagggtccaaaaaagtataagcaaatgtgtatataatcttgcagtgggttaagtcttttttttttagacagagtttcgctcgtgttgcccaggctgaagtgcagtgacacaatctcggctcactgcaacctccacctcccgggttcaagcaattctcctgactcagcctcccgagtagctgagattgcaggcacccgccatcatgcccagctaatttttgtatttttagtagagacggggtttcaccatgttggccgggctggtctcgaactcctgacctcaggtgatctgcccgcctcagcctcccaaagtgctaggattacaggtgtgagccaccgtgcccggctgggttaagtcttttaagctcgttaaagacataaggaataggacttacatacacattcacaaatctttttttttttttttgagatggagtttcactcttgtgaggctggagtgcaatggtgggatctcagctcactgcaacctcagcgtcctgggttcaagcaatcctcctgcctcagcctccgagtaactgggatttcaggcatgcgccaccacacccggctaattttgtatttttagtagagaaagggtttctccatattagtcaggctggtctcaaactcccaacctcaggtgatctgcctgcctcagcctcccaaagtgctgggattacaggcgtgagccactgcgcccagctcaaaattctttaagtcagaaacataagcagaataaaaggcaaacgacaaattggaaaatatttgagacaaaggattaagatattatttaataagaagtacaatacttagaaaaagattaacccactaaaataagcgaagagctattcacataataagtacatgagaaaatgttcaacttcattatcagtaaaagaaatgcaggccaggcgtggtggctcacgcctgtaatcccagcactttgggaggtggaagcgagtggatcacctgaggtcaggagttcgagaccagcctgaccaatatggtgaaaccctgtcactactaaaaatacaaaaattagctgggcatgatggtgggtgcctgtaatcccagctactcgggaggctgaggcagaattgcttgaatctgggaggcagaggttgcagtgagcggagatcgtaccactgcactccagcctggatgacagagcaaaactccgtctcaaaaaaaaaaaaaaaaaaaaaaaaaaaagaaaagaaaaaagaaatgcatgttaatactatttctaattggaagaaatcttttaataataatagtctatgctagtggaagtttttgctggtgggagtagaaattggtagtttggcaatatgtctcaagagccattcactgagccgtccacttccagtaatgcatttctgtaattgatagtttccttgaaaaccatctgtaagatgattcacaaagatttttttttaagaatatttaccacaaatcttatttataatagttcgtattataaatagagattggttaataagttatggcctaactatgggtaccagataacctttggaattaatattgtggaaggttatttagtcctataaagagactaatgacatattttaaagggaaaaagcgtattataacccaatatacacatactgatcccattccaatttgtgtttatgtgtgtgtttgaatacacacacccgtgaatagaaataatcctggagggccgggcacggtggctcacatctgtaatctcagcactttgggaggccgaggtggcagatcacttgaggtcaggagttcaagactagcctggccaacatggtgaaactccatctctactaaaaaatacaaaaattagccaggcgtggtggtgcatgcctgtaatcccagctactccagaggctgaggcaggagaatggcttgaacccaggaggcggaggttgcagtgagccaagattgtgccactgcactccagcctgggtgacagagcaagactccatctcaaaaaaaatcaaatcctggagagagatagtaacatatgttctctctgggtggtagaattataggtgatttgaattttctctgcctcatgcttttcgtattttctccaataaacattttcaaatcagaaaaacatgttatactattttttttaaattcaatttgcaccaactgcaacgggaacttttgtcagtcaccctcatggcccagcaggaagtcacagcaggatagggatcttccgcagcagatagagtgggaaagcaaaaagccagaatttaggggaatgtgattccacgctcagcaaacaggggcacctaccggaagtcctggaatgaaaatcattacatagtcctgggtcaacctgcaagagagggagaagctccggagctgaccaggctgtggcccggggaggcagggccctctcccctgtgtcctccaggactgggtgctcggccgctgtcccagggtctcagccaggactgtgaaacctcagcatcaggggctgctgcttccagatggtaagcaggtgccaggaggggcagccgaaacacccaaacacccaggcctcaggatgagggaacttaaattcagagtaacgtggttcgtaagaaaaaaaggttatatcttaaaaaggaataaccaaatgaaatgtacataatataaatgaacaaggcatccctatgagagggatttattataaaataaatttaataataaactataggccgggtgcgatggctcatgcctgtaatcccagcactttgggaggctgaggcaggtggatcacgaggtcaggagatcaagaccatcctggctaacatggtgaaaccccgtttctactaaaaatacaaaaattagcctggtgtggtggcacgtgcctgtagtcccagctactcaggaggctgaagcaggagaatcacttgaacctgggaggcagaggttgcagtgagccaagattgcaccactgcactccagcctgggcgacagagcgagactctgtctcaagtaataataataataataataataatcatcatcatcatcatcatctataattcatcaaaaagtggttgtcatctttctccttttcggaatatgggaaaatgcacacacttcatttcttcgaaagcatctgtaaagctccaactgtgtccgggcacacaaatgcaaataaaatgcaaatcccaaattgtttcttgccttgccttctaaattaaaactgggcgtttgtccgcctctgtccctgctggtcactgctggagccgcagccatggggagaatccccaaaccaaagcctggaaggtacccacaggcaccgtgcactgtgagcactcgtggcctagagaagcatggggtgtgagggctgggcatcttcagggtttccctcggcggcccgggtttcccagcaagccccacctccccagccggagcccagcgcacctggacacgtccgggtcctgccggaagagcagcaggatgtgctgggtgttgaggaagagcgcccagcaagggaggcagcagaggagcaggaccagcgcgccccgctgcaggatcacgcccacgtgcttcttgttggggctgccgaagctctgcaaaacagcccgccccgcgtcagccgtttccactgcccgggacattcctaaatcccgcgcggggagcgggctgtcagcggcgccagcggtgtgtggcggacccggcggcctctggtgaccacagcctggcgcccgcagcctgtaatggcacagcggccttcctgagcctgggcctaccactgtctccactgttcttccaaagctccaaggaggacgaaggcacatggggcttcatcacatgtcagcggcaggttaagtggagccaggacaaagcccaggtccaccgtgaagctaaaacccccagggagaggtgaggccttgccgctttgtgaccccatggccacctgggcagcccctgctggactgcaggcccctgcaagcagggaggttccttctgtgtccccttggccttcgacacatgcctgcatgtaggcagccgaacttaggattgaggctggggaaccggttgtctttctctacttggtgacctcctctgggggcaagagatcagagaactgtctccaccatctccacccctttctcctggcccagactctttcaaaggggagggtctgtttccctgacagcctgtggtccttggaggtagggcaggggcagctgaccccagggcccattgctcccagatcacctggctgcgcccctcccacctgccatctccatggcacctgtggaattggctctgcccttgcctggcttcctgcccagctccaggaggccacccacctgagacatcaaggtgtcacatgccgaagacaaaccaactcctacagaaactccgcagacattgacaaactggcgccacacacaggaggaaacaagagcttgtcaggtgaggcctgaagagaggcccctgcatctgggctgagccagggtcaggaaatgctgcccagcaggcagcggtggcagaggctctgctcagcagcctcatgtgctgtgtgccccagggccagaccgcctccatctccggccctcaggttccacctgtgaaggcagctgtccagccacgtgggctgtgtcttcccatccctgaccagccacccaagacgggcccacccgggaacccggtggagaagcctggggagagaacgtccctgctctgggccaagctgggtactcacggccaccgcgagggtcaccgatgccagctccaccttgcccaggtgcccgcagaacacagtgctcacgatgtagatcataaaagtcagcacctggaacaggaactggaggacagcggccaggtcagactcggggccacaggtgcccacacagccgagccctgcaagacaggcctctccagctttgagggccccgcaccagtgccccgagaggtcacctacgcctggggaagccagggctggaggtcggatgacctagcccagctcccattctgcgttctgcagctgcagtcacgcctggcctccacgtccctacccagaagggtcagtgcctggcgcagcgcagtgcctggcgccctgagcttgacccaagtgtctgatactgctattgcagttcctattataacaataatttggtcaggccgcacacccccaaaaaaggaggggaattaaatacaccaaaatcttagtaatggctatttccaagtactaggatttgagttaaatttctttcttctttatatctttcatttttttctaaaagttttacaggaagtgcaattccattactcctttttggttttgttttttttgtttttttttttttttttgagacggagtttcgcccttgttgcccaggctggagtgcagtggcgcgatctcggctcactgcaacctacccgtcccgggttcaagcgattctctgcctctctctcccaagtagctggaattacaggcgcccgccaccatgcctggttaatttttgtatttttagtagagtcggggggttctccatgttggccgggctggtctccaactcctgacctcaggtgatcctccctgctcggcctcccaaagtgctgagataacaggcgtgaggcagcacgcccagcctattcctcttcatgatcagaaaaaataaatgtatttaaaacaatttcccctttggaaatgaaatgggtagccggccccttcttccccctgcgaaggtgctgcaggcttcatgcatctctgggtcccatttgtcctggagccatcttccaactcaggcttttgtgggtttccagctgaggcacacccaccccttctgtgtgggggctgcctgctgctgagcaaagtcaggccccactgccactggggattgtccagagacagctttcaggagccatcctgctgtccccagactctggacctggcagtcaacatgggcagtttctggggaaaatgtgagcacatttctggatcctgcctgcaaggcagacaccctcagcctctcagcttcctccactccctacctgccccccagctcctcctccttaccaggggtccagaaagggcaaagagagtccacatctcagtcccaaagcctctgggaaccagcctgctgagggcagggcagcagcccccatggtccagggccactgtgtcctggaggctgtccattcctggccggggcactggctaccctgcacgcctgagcgcctgcacggccagctttgtccagcgagccaccccctgcctgggcagcccgtgtcggtacagcctggctgatgagtaaggggcaggaggaggggctaccatggcaacttgtgggatgagccctgcctcctagggcactgagtccctgctgccaagcctactgcctcagccactagggaggacaggttcctgggagtcacccagaccgctgcctgttgtgtctggtctcccagagggattggcagtaaggcctcagcaggagaaggtccagggctgcctgcagtggctgtgggaggtgtgctgaggccaggacagggcagcctggctggggcagctgagccactgggcgtcctgtacccgggcgtgatggtgcccacagtgactcccgtttttcagaagaattggtggcctgcccgaagtcacagagcaggtggtggcagagcctgaacagccctcagccctgcttttccctgggaggggtggcttcccaagagacaggggcctggcaaaccccatggcagtgcggtccctagcctttcatgctggaggggcctgggcctgggcctggggatagggatgggagctaggacacctcggcggagtcccaagccccccactgcccgtcacccctttcagcagcatatctgagagccaggggtggcagtgcttgggaaagcagctcactatgcacgccagtcactgtgcccagcaaggctgtgactcgacgtcccacagggtcctctgtcaccttcccaaattgccctctctgcttttccttgcagggatggcctgtgactcccccctcaacctgcctcaagaccagcagggcagtgggaaccaagagaggcatctaaggattgcaccggtcacctagcccagtcctggatcaagcttttgggtgtggttcagcccaggagaaggaggagtgagcgaggggggcaggaagacagcaggcaggctggccagtggctgtgggagggctgaagacatcccaaaggccccacttggttcccatgtccacccctgcagcggaggagtggccggcaggattccgagatgcagcccccagagccgcgaggaggaaggagcagaccctgaaggagaggaggcaggacaaatacaaaaaaaaaaaaagggtttgctacacccatgggcggccccaaacacaggcacagccccaccccagtcaacacgcagccttcttttttgacacagaattctgaaacgctccactggatcctcccaggatcacctgggaggtcacattcctgcccttgttctgatggttcttatcacagcactctccaacctgtgcaccaaatagtacctttaccacctgcctagaggaaagaagacattttatcaccatcgtgattgtgatgatgacaccaaacaggaggaagtacaggtgaaagctacagccctgcaggccaggctattgctagtatgtctgacttccctcctccaacaccttctccacgtccttctcacctttggccagttctcatggtcagcctacctcttccaaaagggcagccgcaaatcctcctgcatccaggggacctgggcctggggtctctgttatgtgaaaccagctgcttccagctgacagggcctctggggagagcagtcacctgctggccttggcctgtcacctcctgtcgcagcattgcagtgagccctgcagccagaagcaatacttcttgggagcccatggcgatgggggtgttcagggagcccacacgtggaggtataggcagaagaatccatctcactccaggtcacttttaatgaggacagctggttcccgtgcccccaccaagctggaaggtgttcagtgcagacgccccgccatcagctcggtgacatcaggctttatccagagctgaccagtgttcagcactcagctgcacaggacaaaggtcgggtcatcttcccgagggccagtcctaggccgagcatctccaaaatcccttctcaggaacattcccaggatttttgtgatagaagccaatgcattcctacattttcttcgggaagacactctcctcctacactcctctcagaatttcaatccccagaccccagtgggtttgaccctggggaggagcaagggcgattactgactccactgccatgcattggccgccccaggcaaaggtggtgcaggcagagtggggggtggggggaagccacctcctccaggtgaggggtgtcagagctccgtgagtcctccatagtctcctggcaatgccttcaggccctccttttgtggtggtaactgcagactcagcagcaccgccctgcagccacctgcagactcagctccgagttgggttttccaggattctgccccggaacctgagatactttgagcggagctgcacatggcccctgtgcgccatcctgtggctggggcggggggagcctccgagacttcagcctctgccctctctccagagcttccaatgctgtcaggagcaacatgccacccttcagtcctgcatcttctgtggtctcagatactgcacacaacagacggatcagcagctcactctcaggaacagggctgccaatcccctagaatatacaagcaagtccgggcgatgctggaccctttcccttctcagctgatcacttgtttccaaggcccttatttcctggggcacatggcctatgacattctcccgatgccagttgccgtgtcagccacgttctctgatggaaacagtagaaacgaactgggatcatgtcagcagatggaagaagggaggaagggggagaggagatcattattgccaggtgatacagaagagggctgagccgccagccttgagaagggagactctggactctcagggtgattcagggaaaggtgactcagcccaaacaccttcagtcccagaggcaaattcctggaagactggggcaagagccaacctgaacaagaatggaggtggaaagggtgggaaggagggaagctgtgagctacctgaagtggggcagggggccccccagaggatgggatgctatgaaagtgaaaacatggctacacaccctgcctcatttatctattaccagcccccccaaaattggtgtcttaaaaccattatcatctgtgtcatgagtctgtgcggcgagttgggtggtccttctgcctcccctagtctagctgtgtctgcagtcaccggggactggcccaggctggccagtcttccaggctcatgtccaggccgcggtgggtgcctgctatcagctgagactgtcagtcggagcatctccacctcccctcataggacctcctcatgcaccacgggcatctcagcataaagtgacctccccgtgcaccacaggcatctcagcatggagcgacctcccaacgcaccatggacatctcagcatagagtgacctccccacgcaccatgggcatctcagcatggagcgatctccccgcgcaccacaggcatctcagtatagagtgacctccccacgcaccacgggcatctcagcatagagtgacctccccatgcaccacgggtatctcagcatggagcgacctccccgtgcaccacgggcatctcagcatggagtgacctccccacgcaccacgggcatctcagcatggagtgacctccccgtgcaccacgggcatctcagcatggagctggaacagaagacaggacattcgatggtgcaagtggaagctgcatacaggtcaagagccagcctgggaggtccccatgcccctctgcctcatcctgttgaccacagctaatcatggactcgcccaaatttcacaggagagggaacagcctccacttctaggtgggagtggccgagaggccatgcctttaaccagcactctcctcttcctcctttctattcctccctctccattctctcttctgctctctcttgtgccacccgctgtccacacttggccccgagcaagggcaagcagataaagacccctgaggtcagtgatgagaggactcacgcatatcgaggacctctttggggaaggaggacccaaagctacaaaatcctaggaatggcaggaggcacggggagaggcaagggagtggagagtcctggcaagcccccagcacacaccctgggattagggaggctcccagccagcaagaggaagcttgacccagggggagctgctcccccagccccagcagcctcgctgaggcagagccaagaggcatgtgggcatgccaggaagtccccctcacttgagggctcagctcctgcaggctcggagcctgctgggggcaagggccaggtccttgggccctgccttcacgtgactaatttcctggagtcctgccaagtacagtctgggtccagggcctctgttaaccttttctcacttggttacacctcactgggcccaaaggtgttgcatttgccctttggctcccagagacatgcaccacaagggctgtggaccaatgtcctttcctctaacccctctccgctgcctcctgactgcaaaacacccatttctcccttgggagggtggggactctggctgatggctcagccccacattcagggcaaaggacagttggggaggattgagctgtccgccccctgcctcgtcccccaggtctcccaccagacagtgaccaacaactgctaaatccctgaggcgcccctcctccactcctcctcaactgtctcatagattttggcagctgcctctctctctctgcctccacctagtaccctctccctccatccctcaccccttcctatcttcctctctccctcctcccgcaaggtctccctgggcaccttccaggcccaggtgctgcacccctagaaatgaccagggctcagtccctgagctgacatcacccctcccaatcctgcaggccaggggagagacagagccagctggcaaagccctcagcaagtggcggcaagacccccagaagacactgccaagtgctggaagatggtgggcctttccatctggagaaaagctacgataaataaaaataaatattactcatcaataaaaagaaatgagctatcaagccacaaaaagatatggagcaacctcaaatgcatattgctaatctaattggaagaagccagtctgaaaaggctgcatactgtacaattccaactctatgatattctgcaaaaggcaaaactatagaaacagtaagatcagtggttgctgtgggggttcgggatgaacaggtggagcacagaggagttttagggcagagacactattctgtaggatcctgtaatggtggatacctcgcattatttctgcaaacccataggatgtacaacaccactagtgaactctaatgtaaattatggactttagttcataatagtgtgtcaatacttgttaatcagtggtaacaaacgtactactatcctcatgcaagatgtcaatggggaaactggtggggaggtgggggtggaggtcacgaggtcactgcaaactctgttctttctgtgcaattctgtaaatgtaaacctctaaaacagaaagtctattttttaaaatggtacacaaaataataacaacggggcatttcttgagatctctagggaacatgtccccctcttgcccatgcatttcatgttggatccagaatgcagcagcagcacttttcacagttgccaaaaactgtggcaagctcaaatgtccatgcactgatgaaaggaatcgcaagatgtggaatatccaataatggaatattattcagccataaaaagaaatgcagtattgatccactaaaaacatggatgaactttgaaaacatgatgctatgtgaaagcagccaatcacaaaaggtcagaaagtgtgtgattccatttctatgaaatgtccagaataggcaaatccatagagacagagagtagacgagtgatttccagaggctggcagagagcgggcagcggggggtgcggggcacatagggtgacagctaagcggatatggggtttctctggggggtcatgaaaatgttctaaaattgattgtgatgctggttgcacatctctgtgaatctactaaaagccattgaattgtatactttaaaaaggtgcatatggcggccgggcacagtggctcacacctgtaatcccagcattttgggaggccgaggcgggcggatcacgaggtcaggagatccagaccatcctggctaacaccgtgaaaccccgtctctactaaaaatacaaaaaaaaaaaaaaaaaattagccgggtgtggtggtgggcgcctgtagtcccagctactcgggaggctgaggcaggagaatggcatgaacctgggaggcagagagcttgcagcgagccgagatcgtgctactgcactccagcctgggcgacagagtgagactctgtctcaaaaaaaaaaaaaggtgcatatggcatgtgacttttatctgaatgaagctatttataggtgtggggggagggatgctgtaagctctttacacaccaaggttatatatatgttgggacggtgaagaattgcatgtgcaaagatagatttttacattttgggaaaatgtataaaagaggctggaggctcacctgcaaggcggccaggatagtggcaagagaggttgtccgttcagccttgtcatatttgtggggagctgccaccccaagccctgggccctggcaaatttccagcaggagtcccagagcctgaacattgcgctgaaagaaactccattgcctcatccaaatgagggcctgagagctctggcagcaaccctgggtggcaaatttgggtttaaaccagttgcactttatcatcacttaggaagctttcgcccctcctcaaaaaaaaaaaaaaaaaagaaagaaaaaagaaaaaagaaaaaaccgctatccagggcccgccccagacattctgatcggaaattggcccagacagctggggtttttttgcctgatttcttttttttttttttttttttttgagacggagtctcgctctgtcgcccaggccggactgcggactgcagtggcgcaatctcggctcactgcaagctccgcttcccgggttcacgccattctcctgcctcagcctcccgagtagctgggactacaggcgcccgccaccgcgcccggctaattttttgtatttttagtagagacggggtttcaccttgttagccaggatggtctcgatctcctgacctcatgatccacccgcctcggcctcccaaagtgctgggattacaggcgtgagccaccgcgcccggccgcctgatttctttaacttcttattgaagtatatcatttatacagaaaactgtgcacgtgtacacctccttggattttcataaaataaatgcacttgagtaaccagcagacagatcaagaaacagaactttggtggcttccaagccccctggtttccccttccagtcactgtcccttaccaagggtagccactgctttgactttgggcaccagagaatcatttgccaggcattcttctaaacctccctctctgatgtgcagctggcgctgagagccacaggtctggacacattcaccctggggctagggcagggcccagcttctcagcatgttgctgccagacttgatcccaattagtgtccttggcaaagatggaggggtgcagtgccattgtgctcaatggttacttctcaaattaaaaggtgcatgtcctgactctcctaggactgcctgatatgggtgggctactgagcctggctactgttggctctacacctatttgtccctgaggttacccttccaggcactggcagggctgtcaggtctcagtgacttgatactgcttatccccgccatcccctcccaacttggtcagccctcgccaaggggaggattcggggtctgtgaagccagcccaggtgcggtccagggagcaggcgctggggacttgggtgcccagccgcagggatccctcttaactccactgtcctcatcgggcggagaccggctggcatgaaacaccgggctttttgaggtcaaagcgaggcttcgcccacgcacgtgacaccgccagggcgcgcaaacaggaagcccgagcccgggctgcaggcgttggcaccgcagcactcgactggcctctctctaaccgcaggtcctaactcagagcagcctccggcgcgggtggcgcggataccgaggcctgcgggggacatccgccgcctggaacgccccgcccggtcagccagcccctcaggggcggcgagcgcgcccacccgctccccgtggaccctgccctcgggggctgcacaggtctccccaggacgcgtggcccccacactggacccccggacaggccctgcccacggcctggaaggcgtggtcctgtgtgccacgtgacagcctccgcgcgggccgcagggggttggacacctctcccaggatggaccaatctttttttttttttttcaagttgagacggtttgaatggcatctgttcctcctaacccgtgacccctgactgactgtgtgaggcctgtcgggaggtctccacttcagctatctccccatccacaacctcactgtcttcatactgaccccactgaacaaagcctggctttaccatccttcctcgtgggccttgctaggaggcagacccctagcctgagggccaggggggcttccagaccacccagcaggccatttcttgacccatcagacctatgttagcctgcggggaaagaggacatccccacctgctcctcatacctgcacgcccttcgtgaggttgtttgtttaacccaactggaatgagagaaaggaaatacataatttaagctcacttcagatagacttggattacattctgattctgccactttttcgttgtgttgaccttgggcgagtcatttactctctttagtttgttccttccttgtaataaaattacatatgatccagcaactccatttccataaatacccaaaagaactgaaagcagggactcaaaaagatatttgtgcacccatgttcacagcagcattattcgctacagccagtggtggaaacagccctagtgtccatcagcagatgcgtgagtcaccaaaatgcggtacatgcatatgacggaatactactcaaccataaaaaggaaggaaattctgacagatgccacatataacatggatgaactttgaggacattttgctgaatgaaataagccagacacaaagggacaaacactgtgtgattccacttacctgagggacttagagtcgtcaaattccaagagacagaaagtagaatggtggttgtcaggggctggagagaaggtgggagttgtttaaagtgtaaattgtttcagttttgcaagatgaaaagagttctgcagactgcttgcacagcaatgtgaaggtatttaactattgaactgtacacttaaatcgggtaagatggtaatttttttttttttttgagatggagtctgtctctgtcgcccaggctggagtgcaatggcgtgatctctgctcactacaacctccacctcctggattcaatcgatcctcctgcctcagcctcccaagtagctgggattacaggcgtgcaccaccacacccagctaattttggtatttttaatagagacagggtttcaccatgttggccaggctggtctcgaactcctgacctcaaatgatccatccacccgccccgggcctcccaaagtgctgggataataggtgtgagctacctcacccagccaagatggtaaattttatgttgtgtgtattttatcacgattaaaatacaaataaaaacaaacctgacatacagtattggtacaagaaggagataggctaacatagatgtaagtgtctggaacctagtagacatttatccaatgttatggtccttttttctttcatgctaaaattctgggtccttggctcctgatgtcttaaagacatagactagatgaaactcatttgtaagtagcccagacattacttatatatcaatgaacactgtaaaagttctcaggtttcttttcttaagtaggttaaataatctgcataacacattttgttacataacaaatatttttgaagaaggagtaagaggaggagaacgaggaggaggggggggagaaggagaagatgactcctttggcttggaaagaaaactttggcttggcgtttagcattttcatttctacaaattccccacagaatacgtctgaatggtgtgtaggagtgtatgtgatgatgtaatgatatatgtaggaatcggagcctccattatgtgctaattgtgcagcacgagacacatctcatttaatctcatttaatgccaaccttttcaggcagatatacttattcccattttacaaatgacaggattgaagctcagagaaagaaagtacttgcccaaggtcacactgctagaaagtggcagactcagaatatgaggctgagtctgtctcctatccaagtgcacatcctttctacttcatctgggatgacagatagcttttctccagcctgccagttctactctgttgtactgcattgctatattgtgaattcagcggattcagcaaagcaaacaagagtgcggtgatcaacttgtaatgtctgccatggacactggatagaggagtaacagtatgtgtgcttatggaaaaacctctccaacttacatcatagtgagcacaggtttaggagcagaactagaaagaaaatatttttttctgtctgtctagcaactgttggcctgaaaaagaactcagtgtcagaatggtcaggaaggcccagccttcctactgtcagggtgtctagccggggctaggtctctctgtcctcacccctttgccttcccaaggtagggaaggtgtagaaaatccagttgggaatttctggtagaaacttctactcctggtgccaatttctaccagtcagctaccctgtaaacttctatcaggcatacaagccttgggaaacagagagctgttgtcttgctcaagcacaagttaccagcaacaaacatttgtttcccagcagatcacatgaggacttgtgagatcatgtctggccctggctcaaatagaagatgttccattaaagcagttcccggggaccaggcctaggcaactttcctaggatgggcaaggcagttgttcgggaagcttggcacctgcacagccccattgtcatgtgaggaaacgaagggtgtgagctttcccccacctgtccacttagaagcgtgggtcaaagcagagaagaggggatatctccttcccatctgcccttgtcctcccaccccacccaggctgaggtgcctcctactcctcctgctctgctaagaggctgagatctgtctgagctgttggcagaaccctagaaagtgctcccaggtcatcccaggcctcccagaggcagggtctggcagggtggagagctgccatcatggcagagaactgcagcatcaggcagggaaaccaaggcagggcccaatgggtgtgggtgaaagctgcacatccagaagtacacggcttcccccaggcaccgcagatcctggccctgaacgacaagagtgcctgacctcacgattgccagcagctgcctgtcctgcaaggcctggccctgtgccagggcagctgctttgcgtgtggctgcctctcctgcccaaacaatttctgttgcctttaggaatgaaggagctcaggccaagcccagttggtgttttcaaaatttcctgtaaacaaaggaaaagatgaagcttatataacacccttggctggagaatcagcggctgcttggcatagctgagagagaggcctgggcgcagacagtggtgtgtccaggcaggcaggggcctgggtcatccctctcaggactattctttctgaaccttctgcaaactctccagtgacctctggggcccatttcagaggtctgagcagctcaggcttggagaaccacagagctagaaggaaaaagtattggaaataataagaactaatattcattagcccccgattaggcgcaagtgctttacctgcacaatctcatttaatccacaccaaccctaggaggcaaacactgaggtaaccaattagtagctgaaagataggcccgggggtgggccagccacccacgttcacatggttgggtatgatcgatcacttggccctcagcttcccttccacctcctgctcacagctctctatgcagcagcagctaaaacccacatttcccagactcccctggggcagggttccagggaagaatgaagttctgcacttcagatgcacttgtgtgagagttggctgcttcgggccaggcgcggtggctcacgcctgtaatcccagcactttgggaggccgagaagggtagatcacaaggtcaggagtttgagaccaacctgaccaacatgctgaaaccctgtctctactaaaaaaaaaaaaaaattaattagccgggcgtggtggcaggcgcctgtaatcccagctactggggaggctgaggcaggagaatcactcgaacccaggaggcggaggttgtggtgagctgagatcaagccactgcactccagcctgggtgacagagggagactctgtctcaaaaaaaagaaaaaaaaaaaaagagttggctgctttggttgctgggtttcctgcactagtgatctcttatccagcagccgcttctgtgagtgtcaagaagcagttacagtggtgatggcagtgccagcttcccagtcccagcttcccttggattgagcccatgacaggaaggttttgtttgtttgagatggagttttgctcttgttgcccaggctggagtgcaatggcaagatctcggctcattgcaacctccagctcccaggttcaagcgatactcctgcctcagcctcccaaataactggaactacaggtgtgcagcaccacgcccagctaattttgtatttttagtagagacggggtttcaccatgttggccaggctggactcaaactcctgacctcaagtgatccgcccgcctcagcctcccaaagtgctggcattacaggcgtgagccaccgctcccggccgacagggagttcttgactttcacagttgcagggtggcctcaggtgggtggtgtgtgtgcgcagggatctgcacaaagactggcgttgcgcgggtgtctacagtctggaggccctgctgacgccctgcagtcctggggaggaagagacttggagggaggaggtgctgggaggtctaagcagaagtctcaggagaacaagcccgccctgttcaggagacactggaacaaggagtacaccaagcggtaagaggaggagagataagaggctctcagatgtaagtaatgggaaatgcttcaaaatggcaaaatggcttgaggaaaagaaaatttgttaaagggaaggcagctccagcagctcattcacatcccagagcagcccaggggcatcatctccctactaagccggtctcagcccgccggcctcgcctcagggctgtcctcatggccacaagatggctgtgcattccaagttcacaaccagacatgccactctctggcgggagaggggtcgccctttcttgtgcatctgtttttattggtgctatgatctgaatgtttgtgtccccctaagcattcaggtgttgaaatccttgtccccagtgtgatggtattaggagtttggggcctttgggaggtgattagtgcccttacaaaaaaggcctgaggggccgggcaggtgcctgtaatcacagcactctgagaggctgaggcgggcagatcacttgatgtcgggagtttgagaccagcctggccaacatggtgaaacaccatctctactaaaaatactctactaaaaattagctgggcgtggtggtgcacgcctgtaatcccagcactttgggaggccaaggtgagtggatcacttgaggccaagagttcgagaccagcctgaccaacatggtgaaaccccatctctactaaaaatacaaaaattagctgggcgtggtggtacacacctgtaattccagctactcgggaggctgaggcaggagaatcacttgaacccgggaggtgaagtttgcagtgagccaagattgtgccactgcactccagcctgggtgacagagtgagactctgtctaaaacaaaaaacaaaaaacaaacaaataacatataacccagatatagtgatgccctggctctagcctagaacataggatgaaaatctcaggatcctaagcatcatcatttttaaagaaattttcaaaattgaattctgttaacaatgagggaggaggaacagatttgcacaggcaacagcagtgtttgccacgcttgctcagtccaggcagtcagtccagccactcaaggtgactccagagaaattttgggaaagaaggggactcagagaaggagccaccctgctgtcccctgggcagggctggcccacagcagaggcggagctgagtccaagcctggcaccagtcctccctgcagccttctggagtgtgagctggtgaagttccttttttaaactttttgaatcttagtttgctgctatttcaacatcatcctgacagattgggatccgggaaatgtcacccgctcagccttgagtaccccaaagtgggatgagcagagaggtggccaaggagtagaggggagtcccggcagagcagtgagggctctggagccgggggccccacattcaaggcagatggtgtgggaactgcctggatggcagcagttgggggagaggggacaagagtcattgcaggtcagggttggagctcaggggcccgtgccctacctttccctcaggcaagtcctcaaccaatggtctctaaacaccagcacacccctcatgacctgcatggcgtggcctggctttgtagggtagttctcatgtcactttattcctgtgtttattgtctttctctgtccatgcagcagggacatttgctgctcaacaaataacgactgctcctccacagttcccagaaccctttcagctctgggctgtggtcctggccagtgggctatgagtggaggtgatctggggtggcctctccagttctcccttccctgctttggtgaacccctagccctgcactgagatggtgaaggctctgtcagctcctctctggttgaccttgtggagcagagctcccccaacctcctctgtagccgccgccattctgaggttaacttgttcctgccgcataaccctgcaggtcctgccgaagacgctcccatcaaggtgagctcctcgagcgcagtccccgccacgactgcctgctggaggaacccataggtgggcgcaatcttcccttctgctctagaacatcaggagacagagggcatcagcaatgcaacagagacggaagccttttatggcttgagactttgccttttagtttcctgtttgggagagactctacattttcttttgttttgctttgtttttttgtttgtttgttttgagacagagtctcactctgtcacccaggctggagtgtagagatgctaccttggctcactgcaacatctacctcctaggttcaagcgattctcctgcctcagcctccagagtagctggattacaggcacctgccaccacacccagctaatttttgtattttagtagagaaggggtttcaccatgttggttaggctggtctcaaactcctgacctcaaatgatctgcccgcctcagcctcccaaagtgctgggattacatacattttttttttaatctgagaatctaaacaccaggagcaatcaatggactcaacaatggcatgctatggctgtggctcctgggcagaagtaggcccccttctgtgcaccatgcatagcatggcatggattgcaatgtgcaatccggaaatgtcacctgctctccttggtgacacgagagttgcgattatccttggtctttatgttttggacaatagcaattatgtggaaaggttgaatcataattgggcaaatatttttttccagcccattccttaatccatgtcatagaaagaaaaaacagtagattaaatcatggtgttgggactagaccaatttttttaaattgctgttttattttaaattgagatctaatttggaaatagaattagttcagaaaaggtcagacttggggcattatgaataaagtaggtaatattgtaaattgtgtcatactaacaacacatagaaaaaggagatggacgaggatgaaaagaagaggaagaggagaaagaggtgattatgattctcacccacctgctctaattcttcagtttggaaagtgcagataatgtccttgggaacccttagctttctctcctccattctgaatgtttccaactgcgtcaatagctcctgatgcaaaggttttgaggaggctctgtgatgtcagagaagaccagatgccccagagctgtggcacctgtggctggcacccggagaccttggctagtgacactgcttcttaaacctcaggttcctaatctataaatagagtcagtgtggtggcttacgcctgcaatcccagtactttgggaggctcaagcaggaggatcagttgaggccaggagttcaagaccagcctgggcaacacagtgaaaccctgtctctacaaaaaattaaaaattaagcatggtggtgcacacctgtagtcccagctactggggaggttgaggggggagaatcgcttaagcccaggagttcgaggctacagtgagccgtgtttgtgccgctgcactccagcaacagagagagatcctgtctgtaaaataaaaaataaaaataaataaatttcaacaaatgagctcacaccctcactgcacagggccattgtgcagtgggtgtagtgggtgcattgtgcattgggtgaaggtgaaggtgagaagccagcatgtgccagccaaggctcctcttcctcccaccttcggctgggggcaactgtcatttatcagagcattacctgtggggcccttacctgggatgcatgaggacaacaggacacactgtctttgattaggatgttgtctttgtggttaatatggtttaaaacctctgggctgttttatcccacagcgggatcctatgaagcttgttgtcatctaaaatcaggtaatttcaggctgggcacagtggctcatgcctataaacccagcattttaggaggccgaggtgaatggatcatttgaggtcaggagttcgagaccagcctggccaacatggtgaaaccctgcctctactaaaaatataaaaattagcctgacatggtggtgggcacttgtagacccagctactcgtgaggctgaggtaggagaattgctggaactcaggaggtggaggttgcagtgagccaagatcacaccactgcactccagcctgggtgacagagcaagcgagactctgtctcaaaataaataaataaatgataaaatcaggtaatttcagatgagatgatggtgcggggttggggggcgtttagagcaacaaaacgccaatgatgtctttgaaactcactcattttttcatttactcaacaaatatttacatagcaccttctatgtataggccactgttctagcctctagagatctagagggaatgcaatggacaaaggtcagcgcttgccttcgagtggggacagacaggcaataaacagatacacagacaagacaaagactaaggcaggcgagtgagagtgaatagggaaaagaggtgagatttgagccggaggaggcttgatgagaaggatccaggagaagaaggaacagtcctgaggaagggaaaggcttgcaggaggccatgggtgttgaccaggaaattcgtggcagaggtcagagagtaaggcagggcccagagcacatagcgctttgcaaggcaatttacggatcctcaagtgcaacaggaagccatcataacattttatttatttacttatttgtttttagagctggagtctcactctgtgacccatgctgcagtgcagtggcatgatcatagctcactgcagccttgacctcctgggcttaagtgatcctcttgcctcagcctcctaagttgggactacaggtgtgcaccagcatgcctggctaattttctcatattttgtagagatggggtttcaccatgttgcctgggctgatcttgaactcctggcttcaaatgatcctaccaccttggcttcctaaggtgctaggattgcaggtgtcagccactgtgcctgacctgctaattagctctatccagaaaacaaacctcttatatctttatgacaggaggtaattttgcaacttggacagatatgcccactggaaattaggcttcttccctctcacaggaactagaagatgggggtgcatttcaaagagatgacaccccagcccttgagaaagatgtccggctcgtaaagctgacaagagtcttatttattacagcttctgaaaagacttacacacatttcaaagagacagaacttacaatgacatgttttccaaagcaggtgctctaagacaagggaagggagagaaatctctttttcaacagagataattaagtctcttttttctattttttgagacagagtcttgttctgttgcccaggctggagtgcagtggtgtcaaaacagctcactgcagcctcaaactcctgggcttaagtgatcctcccacctcagcctccaaagtagctgggaccacaggcatgtaccaccatgaccagctaattttcttacatttataaaatataagatggcatctcgctctgttgcccaggctggtcttgaactcctagattcaagtgatcctcctgccttggcctcccaaagcactgagattagaggcatgcgccactgtgcccggcatgcctcttatttttgcattttaactttgccctaatggagatttttgtattgggaatatcatctgggtgcacagtgaagaatgaaccacagggaagcaagagtggaggaaagaaggccacttagaaagcatttgctggtgctcaggccagggacgtgagggtgaaaatgcagagttggacacgtttttgtgatagttgaaggtgctcccctgggggcttgcggaagtcttgaacttgaaggaaagctgggagtaaaggctgactcctaggttttggcctcagccactctgcagggtgacattcactgggaaagaatggcttaggccaggcccggtggctcacacctgtaatcccaacattttgagaggccgaggcgggcagattacgaggtcaggagtttgagtccagcccggccaatatggtgaaaccctgtctctactaaaaatataaaaattagctgggcatggtggcacgctcctgtagtcccagctactcgggaggctgaggcagaagaatcgcttgaatccgggaggcagacgttgcagtgagccaagatcatgccactgcactccagcctgggcaacagagagagactctgcctcaaaaacaaaaaacaaaaaacgagtggcttagaggggaaaatcaagagttctcctttgggcacgtaagtgttaatttcctattgagactccagttcacagttcaagtcagttgtcgggtatatgagtcaggagctcaaggtcaggagggctggagactaacttgggaacacaagctggtgagggaggagaactggagcacgtggggtccaggaacccggagaacagagtgttcgagggaggttggggtcagacggaaggaggtggcagggcagtggagatgcccaaggtggctgcgagaccctggggatctgcccgcacgagactgtgcctgcctggtcaagagccagggcttccctgtaggacagaggtgagggagggtcacctgggcaagcggaagttagtggggacaggaagcgctgtttgagaacaaccattcagatgagtcttgccgggaaggagcgtagagacatgaggcagttgccgcagggggagccagttaggagaaaatattattttgttttgttcttggttttggttttcaaaatttttttagaaacagggtctcactgtggctcccaggctggagtgcagtggcaccatcacagctcactacagcctcgaactcctgtgctcaagtgatcctcctgcctcagcctctctagtagctgagactacaggcacacaccatcgcacccagctaattttttatttttagtagagacagggtctctattgcctaggctggtattgaactcctgggcttaagggatcctcccaccttgacctcccaaagtactgggattataggcatgagccaccactcccagccaagatttagtttggctcaattctctgggtatacaataagtcacaggtgcacgcgggaaacatccaaacaaaacaaaacataagaaaacagtttcctctctgctcctgctcccaccccctcactggagggaaggaagcacaggtaacacttaacggtttttctggttgcatttggggtctgggggacttggaataaggttcaagacactagagaataggaatggtccaggacagaaggggaaactgaagatgcaggagagagagtaaggtcaggagtgggaagggggtggtggtggcggggcacgggccaggtggagggtgggcttttgctgggagcaggcacaggtggggccaggcacacctgttggtggtggcacaaaactctatgttttcacaaggaaatctcagcaaaagccgggagggctttcctgcatgataccaggagagtctgtgtagaggaccctgagggacaggcccagcctcagcaggtctcccccagcagcctccccttacctgccaggcccaggctgggaggcttcctggctctgagtctaaccagcccccagaacacccagcttcagactccccttgccagaccctgtcctggctcctcaggcctctggggcgggactctgggccagctgcagcccaacgccatgcagttgaggcaccgtgggtgctggtgctgcctggcctcgggtcctttgcccccacgagcagcactatgacatcaccagggcgttttgtgttgactactgcatcgtctcacaaagtggcccctgcccgagatagtgaagctagtctgggaagagacggcatcagctccccatatctgagccactgtgccgacaaggcccagcctcctcaggctctccttggctggacacaccagagatggagctgacctccccaagtctaaaaggaagacaagtgtcaccctgacaccgtgcatggcctcctggcacaaggccccaccagctgatgagaggcctttgctggtacatcagtgaccacactgcgtggggcagtgggatcaggcaggacaggtcggtgggtgcagggctacaaaagaagtgccatatgcctgcatttgctgagttagaaaattgtattcgtctctttattggtctagaaaggggtggagacttggaatggtgaggcctgggcccatgtgggagtggggtgtgcacaggtcagcaggtcagcagaggagtggggctgggctggggctgcaggagcgattctcccagggccaggagagccagtgagggtggtccgcactccgatgggacacagtatggccaggccaggcggagcaacccctcctcagtgctgggtcatctgtgaaagggacacggagtgggcagtgatccccaggccctggtcccgcacagcccggtctcccccacagcgccttccccctctcaccttggccgggctcggggggtatctgaccttcaggccttcatcattcatcagaggcctcaccaggcaagagcggcggtgagagaaagtctcgaagctcttcttgccatggtaggatcccatgccgctgttccctgcggaggagaagtaagcacagggctcagcatcctgcccccaggacgccccaggtttccctctccaccttgttgggtgtatcccagaaccacagggacagggaggcagagccccagccaccatcacccatccttccctcaaatcctatggccctcagcacccagccccaggttgtggcccttttctgggcctcctgagggtggccaatgtctagggtgtccccagggcatccacactgtgggagtgcccagcaagggtctaatcccagctctgccactaaatggctgtgtgacctctggcctgggtcacctttctcaggcctccatgaaataggccggtgcaccaggtgacctctaggaacctctaggctcccaggttaagtgtgtctgatggatggcacgcagaggccaaggtccaaatggaagaggctaatgggaggctgccgcccgggctgcaggaggtggtccctcctgaatttgctgggtgagtgtgcccagccctggggcccagagggaggcagcaagctcagccccagactcacccacgcccccgaagggcagagagtgcaaggtgatgtggacgatgacatcgttggccgccaccccaccactggatgtctctgcaatcatcttcttaatcacctgcaccaggacccagccactggcctcagtctcctgcccacaggatgccccagcccccaacccgaccctgcctgggtatagcctggagccacaaggacaggagcaggtggaggcagagccttagcctccatctcctgctcttcctgcagaccgcgtggctgtcagcaccacatgagcaaagagtgacagcagccgcccccatgcctgtgtgcagggccctgggcaaggatcgctcattcagtgccctcaggtgatgctgctgtcctgatcttacagacgaggtgaaaggagctcagaaagatccagtgacttgcccaaggtcacacagccagagaacagtgaagctgcagtttgaacccaggtctgtgggccccaggaccctggcagagggcaccccaggcccaccacccaccttgtcgttgctggagaacatgtagagggccaggggcttctcacgctggttgatgaactggatggcctcctccaggctgcgcacgcacacgatgggcagcacaggcccgaagatctcctcttgcatcaccggggactgggggtccacgtccgtgaggatggtgggggctgaggcaggaaacaagccagagttggacggcgcagagacccccacgcggatggaaagtgcaagcacctagacccctgctccaacccttttccaggcaaacctgcccaggcttggaaaagggcagggacgaggcctcagagaggtaccctaggcacctgcgtcctggatgccatctgagcagaccactggggacaactataggttaacctgtacggaaggacccgagatctgtctccaggagcaggcactgcacctgccggccacctgatgccctgccagaattctcttgtctccttgacaaactcggggccaagagggtcccatctggtgacccacagcctgggcactgggggcccctcacggctgggcacacctggggctcctgtggcttctgctgtccctgctcctgctgcttcagaggggcagggagatgaggcccctctttctgggcctttgctgggagaggggattctgaggttgaagcaggggctgtcctcagcccctgcctgctggagtctaccgcaggctccctggtgaaagcaatttatacccatcccgaggtcgtgtccgcttatcaagcatctgtgcccacttgctgtgaacttgctggggacccctgcagcctgggcaggtgggctgtgctcttcaggggtcacgcacctatgtagcgagtggcggcatccccggtgcccccataagccaccttctggccctcaatcaggcccatcaccctctggaagtgccgggcactaatgattcttccatagtcccgggatttcttagcatcttccccgtagaactcctgtggagaagaggtgggggcttcgggtaaggacgcagagcctcgtcctgcccaaaggctgcacagacacaggccagcagtgtctgtctttgggtggtgggattctgggtggagcttttttcttctttatgctttttaatcttttctaaataatctatagtgagtgtgcattatcttttttttttctcttagagacagggtcttgttctgttgcccaggctggagtgcagtggtgcaatcatagctcactgcagcctcaaactcctgggcccaagcaatgctccagcctcgccgtagccttctaagtagctgagacaacaggcatgcaccaccatgccaccatgcttggctaatttaaaaacatattttgtaaagatgggatcttgctatgttacccaggctggtctcaaacttctggcctcaagtgatcctccactctctacctcccaaagtgctgggattaccggtgtgagccaccatgcctagcttgcattatgtttatattagaagaaaataaatccagtgtttccaaatctgtagaagttggttaaggggccaggccccccttgtgccttacagcctctcatcccaccctgccaaggggtcaacactcactttcagtgacttcttgagcttctccacaatttggttctggatcgaggggtcacagaggatgtagtcaggggccacgcaggtctggccactgttcatgaatttcccccaggcgatgcgtctgtgagaatcccagactggactaaatccaaaaggttccccaggagttgcatctcgttttgcagacccctgagctctctggtcagcagaagccatcggctgtgaccttgccaccagtgagtcctcccaagcggtctgctcacttctagacactggaccgagcagacccaatggccctgatcatgttcaccggcgactggtggggaatttctagaggacgtctgttgagggcaacctccgtgctccctgatcacgcccttgtcctgcacagccaggtgtcactgctactcgggcccccctacatctctggggccacagatgtgggatatggaggtggtcagagccctggctagggtcaggaggtgcagatacgggttctgccccagaccccgagcagcggtggcccttctcccctctgggcctgctctccagaactcagattgccctgccccatcagagggctgaacccagtacagttccttgtgtcctgaacgtcccacagctgctttttctgcagcctctgcttggagtaccacttccccagtgatgcgcactcagcaaacagagctcagcctagacctctccccctccaggaagccttctgggactccccacacgtcttctgtgcatgtggtccccacccctacccccatgtaagtttctgcaaggaccactgctccatgaggcagggggtgtctgtgttactcagagtggacccacagcatgaggtgcagtcatgtgtgcttggaaagcagagtaaggactgctgcagccagcaggcccgtgcctctcaccggcaggccacgtccaggtcacagttcttgtccacgtagcagggactcttccctcccagctccagcgtgacaggggtcaggtgcttggcagcagccgtcatgatgatcttccccacccccgtgctgcccgtgtacaggatatggtcgaacctctccttgagcagctccgtggtctcagggacacccccattgattactgggtacagatccttccatgcaaggagagaggggaggctcagcaaagaccaagcccctcctcgctcttgcaagtgtgggtgagttgcagtggccaagaccagcagccccgaagctcagcaccccaccttgggcggggggtagcagtaactggcagtagaccgcctttcctggcccaggggctctgttcaccccaatgagagagggcagctgctaagaacaatcctcagccccaccagtagcttggccccttgctgcaagaattcactatttctcaccccccaaagacctggccctagctcagttatgaggccatggagttacgaggccctggagggcaactcaccttgtccaggtactgggggatgatggtagccagcaggctcgccatgttctcactcagctccgagggcttgaggaccactgagttccctgcagagcacaccgagccaggcctatgcccagggtacttcaccagaggctctgccctcccaaggaccacacctgaagcctcccctccattgtgtgtcctcgggacagtggatggaagagttgttagcaaacaagcacatgtcacggggcacacccaggagcacgcacgggcacatgacagagggacacacacgggcacacgctggccagagctgcaccacctggccctctgagttgctgagatgttggaggaaaagcagaaaggggagagaggctctgggggcccggttggtagaacagcgctggcccattctaggaaggaagccctgatgcatattaggtgacagaagctccagccccccaacaggggtgggggaaggcaggccctctctgtatcaccaggtgtggacacctgagcctgactggacctcaggcaccaagaggcctggctaaacagcttggtccccacagcctcctgtgacagacccagcaaacccttatctgaccccaggactcttaacacaggcctgagcccatcctggcttggctccacgctgggggacggtgctcccccagcttcccttcccacagggccatgcacctgcagcgatggcgcccaccatgggctggatggtgaggttgaaggggtagttccaggtgccaatgacgaggaccacgcccagtggctccgagtggatgtagagctcgtcctgctgagtctggggcgtcttctccacgggctcatccgcggcccactcagggagcttctggatcatgtactcgatctcctctaggacgtacaccacctcctcatagtaggcgttccattcattctgcagcgacagagccggagtgagcttccagggccagggcccgcctgcagctggggcgagtggggagccccactgctcagctgccagggtgatgggggtcactcacccagcccagggtgggggcagccgcagaaggctcccaggggaagcagagccaggattagccgttggacctgtgggtctgagaggacccctttctgccagaggggggcccaggtaggtttgcggccccaggggagagagccggtgaagggaccaggcatgggcaacggaatggatccaggtagggggaatagagccgggcaggggagagtagattcaggcagtgggaatggatccggggagggggggatggatccggggaggggggatagattcgggcactgggagctggatccgggcagggtggagggagccaggccctttagttgtctggagggggatgcaggaccaagggctgctgggcgctcagggcctcctgtggggagcaggggtgagaagaggagatgcagacggcggaaaacgcgtctcttttataaacttgggctgtgaagagcaacacagaagctgtaaagtcaacagaatgggtttccttgttgtttctggtttaagatgagaagtcctgagccatttcttgaaaagtgcagtagcaggcccggcgctgtggctcatgcctgtaatcccagcactctgagaggccgagaactcctcctgaggaactcctgagggcaggagttcaagaccagcctgtccaacatggcgaaaccctgtctctactaaaaatacaaaattagccgggcatggtggtacacgcctgttgtcccagctactggggaggctgaggcaggagaattgcctgaacccgggaggcggaggttgcagtgagccgagatcgcgccattacactccagcctgggcgacagagcgagactctgtctcaaataaataaataaaataaaataaaaataaaagtgcaggagcaaagagggtagtcggtgggaggatgggctccggagcgctggaccccaggcagcatgtggggacagcagggggctgcgaatgcagaggtgtctggtcttgctcagggtgagggacggaacagcccctgtgagaactgggagggaggggagagccccccatgccctccggggtgccaagctgctctggttcctggtgtggagaaccaagtggtcctgcgtggggctgaggaatggggaggaccagaagttcagggtgtcggggcagcaggaagttgaaatgggggacgctgcgggcgggacgcggaggccgggccaggaggaaaaggccagagggcggaagaggcggcgggggcgcgcggggcgcggcggaggggagggcggtgcgcccagtctccgcgaccgaggggccaggtggccccaagtccttcctgaacctctctgggtcgcactctccccagcccctccccccacgccccatcgcatggccccgacactggcagaaggcggccgcccagcctgagcaccttgtgcaggtctgcggccagcgcgcccaccagctcctgctcctgctcctggatcaggcgctgcagcgcctccagctgctggatccggaactgcagcggacgggtcctgcccgagctgaaggcggcgcgggcgcgcttcacggcctcgctgatcttgctcatggcgcctggggacagagagcacctgcagctggctgaggggcacgagcgcgccctgcctcccaccctgcctgaattctataggaagggacttccctgggctcggccttggggaaaatggcctttccgctggaaggtccactttctgcctcgcctcctctcccgcccctcactcagacgcctgggccctggctgccttgctagcccctgagaaggtgacacccgccgcaacccgagtcctaagccgaactgctgctgggggctcttggcagcgtgctcgcggcagggcctttcccggccttttccgctcccttacttgcttgcaaagctgatggcacaatcccagaccaacacccccagagctctgcacacgcagtcagccactctccagatcagattggaggggcgcagtccgcgattccacacccaagccgataaagaaaaacccagcaccaccctcctggctaagccattgttctaaaaagcgctggtttcttggcagagctgaaccaggcttggtgtgtaaaccacgcgtgccacacctgggagacgcacgcccatgcccgccaaggattcagagagctgcagatttccacaaagaggtgtggaggcgattcctgctaccaatacacgaaagtatagtggcaaatcgggatggccctgctgggggcaatttggcaatatgtggcaaaagtttttcaaacatacttctctgtgacgaaaaggtcctacagcctttcctaaacattcacgaataagaaagtcatcactgttttctataacagggaagtattgtaaacatcccaaagatccgaaagaaaggagacagtttaaatgactcctgtcacacccacgtaagggtttactgtgcagtatttagggattaggtggagcaggctattcagcatgtttgtaggggctctctctgcaccaggggtgtctcaggcactggggataagaaagaaaacaggttacaggccgggcgcggtggctcacgcctataatcctagcaaacactttgggaggctgaggtgggcgggtcacctgaggtcagaagttcaaaaccagcctggccaacatggtgaaaccctgtctctactaaaaatacaaaaattatctgggagtggtggcaggcacctgtagtcccagctacttgggaggctgaggcaggagaattgcttgaaccaagctgagaggaggaggttgcagtgggccgagattgggccattgcactccagcactttgaccgggagaatggagccataatcacagagttctcctattagattagtggtaggaggtaaggcaaggttagtgagatttgctagaagtcaagaggctgtcagtggaagcggtatttgaaggcctcgggtaagtaatataattactttcagcgagactccatctaaaaaaagaaaaagaaagaaagaaagaaagaaaaacagaaaacaagttacagaacaacagatgtaccaggcgtgtgcatgtgtgtgtgtgcgtgtgtgtgtgtgcgtgtgcgtgtgtgtgcatgtgtgtgtgtgcgtgtgtgtgcatgtgcgtgtgtgtgtgcgtgcgtgtgtgtgcatgtgcgtgtgtgtgcgcgcgtgtgcgtgtgtgtgtgggcgtgcacgctctaacatgcaagaaaggactagaacggtagcccccgacacgatgagacaactgatgggggtggaattattgatgatctgttttcctcttatgcaatgtttgactttttgcaatgagcttgtattttttaaattttggtgcgttttaagataggcactacatgctcatgaaacaaaatgtaaaatatagcaaaggggcacagaaaaaagtctgcctccctcctccctgctccatcagctgtcaggtgctgccccacagaggggccactgttaccagttccttactccccttcctgagatactcagcccacttgcagacccggcataacttttaacatcagcagaaatagggtatttccatttttttaaaaaaccctatatatcatatgtaatatataattatattgtatatagatatatggtcctgcctacattccagcgagtggcttccaatccttcctctgcctcccctccccataggctgacccctaatcccaggctttctgcacagggaggagggacctgctggcattgagggtgctctaagcctggcccttccatggtccctccctatgttctgataggaggctgggaaagccccctcactgggacctcctcagtcccatgggccaggcccctcctgctgaccacaacccaggagagaaggtcccgcttctctcccgagccttgtacggtcaaaccaaggcaggcagcccaggtgggaagagcctggtgagcgtgggacgggattggccttgcaccccagcatcgccacttggaactgtggtctctgggctggacggccttcccaggacttccccgagagacaggttaacaaaggtgccacttcacagagatgagtggacaccatcacgtcgcagctgcacccaaatgggagctgctgcagcatgcactgggggcctccccagagcccgtcgcctcacaccccacattcctgcaccccgctcctctcacctgtgccagtgttgactttgccccccagtgacacctcctcccctcctcattgccttccatcctcacaaaagctctgtagtgatgcccatgaagaagaaacggttatgagtgcattttacagatgaggaaagggagactgagaaacgtttaatgctgtatctgatctcacagttagcaggtggcatgtcagggtttgaacccacatgcatctctgtcagcagctcatgcctttagcactcggctctgctgccttccttccagtcatggagtctgacggcccatcagggcctctcactccacggccaccttggtgtccctgctccgcggatccctgggacctctgcctcctggtttgggggatggcagagctgccagaggtccaggaggatgctccagagatgatggtcccagaggcagggaccccctggagagatgatgtaggactcttgacacttagggccccggctctgagtgcagactccacctagacaagagaaaaaataaggaatgcagggaagaggattacctttgacacagcctctcccggtaactggggctcctggaacggcaagagccaagaggggacgtatttaaggaccctgcttcccgtccattgagcccttggagttcctgcccaggaagtttgcgtgacaagaaaaaaaaatattcaaatgtggggtgtggcgtcctctggacctctgctccctacagcccaggttttggggattaggtcccgggctgtttgcttttgttcacttctgaaatgcgagaatgtttctgaaggcttgggcagggcacatctccaatcttcaaaagagcctatgtttgccctgggcgtgggggctgctgattgattcagcctggcatggagctcttccagctttccagacttgccgctgccagatgcggttctctgagttctctggttacataagatcggcagggctcagccacgaaccacagtgagagcatgcagctcccccgaaacgcacccccagccaccgctgccccgggcccttcacatcccccagtgtgcacagggccccattgagtcagagatcctaaccctggggagccacaggctggggacttttgatgggggtctccaatccataaatctgctctctcgttgaatagctgagaagagggccaagggtctgtgtggtcaccgaaaaccagagatgcttgggaaggaaggagtctggaaaagccgttcccacgctgtctgatcaatgttcgctgggctcctgctctgcaccacgctgtggggaggaggcaggtgtggaacagactctcggcccctctcaccaggcgcttcccgccaccctcacccgcctgcaggcagactgcttaccagcatggggtccctgcttcccatttcattcgaggaaaacacaaggttccggtcctggcctacgagtcctgaggatgtgctctggccctcctgcttctctccacctggagcccccttcccctacatccacccacacggctacgctccaatgtgctgtggaaaatagcacaatgctgtcgtcttcctccattattttttctctggagcgtttatatcttgtttgctacctgtcccttaactcctgacagctagaatttgatttgttcactgctgtaacctccatacagcatttatagtagatgctcaataaatatttattgactgacaaaataaacaggaaatttcaaaataatgtgaacactgtagtaaccaggtaggcagaggatgctagaggggctggggtgagagtccgtgggagggaacatcatctgagctgagtgagaagcatttgggcaaggaacagcaagggggctggaagagcagaagcaaaggcacagaggctgggaacgttatgtcacgaaaaagtgcgatgtgtccactgttgccagcaggaggtgtggaggtgaatgactctcctggggcgggggctcacggaggcctgtgggccaggctggctgtgggggtgcagggcgctgaggagattatcagacagacaaatgtctgctattttttgttttagagaaccccctggacagggcacagtgtgagaaaggtctagcccaaaggctgcagcttccagcaatgcaggcaagaaatgacgagacccccaaataagactaacagaatgggaaacattccagaaacagcagaaagaagcatctgcaggacctcgcacctgtgcaggggctggactgggtggtaggtgcaaagtggggtgcctcctgagaggggagaagaccgagcctgtgccagcctctccccttttctggtggcagcagctgattatctttgcaggcaaccccttcctacttggtgagatgatcaaccaggtgccttctccaggccagccatgggttggggtgggctccccatgaggcctccctgactctcctgggaatttggatcttgagtagagggcagaatgcaaggccgaaggccattcggagctgacttcttgtggcagcggccctcccctgggagaaccatggaagcaactagcaaaagccagcaacacagcattgagtacacgaagtgaccagaacagtgcctggcgggccgagggcatcctggaaaggttaggtggtgtgggtgtcatcaaaagtggcagcagtagtggtggaagcgtcagagcaaggagcctaaaagcagttcaaatctacgaagaacaaaatccttgtttgcgtgtttgggttttggttatagtttcagtagtggcaaaagtgtgggagtgtgggttgtgctagaaacttgcagatacttgcttttcagattttcttttttctttttttttttttttttttgagacagggtgttgctctgttgcccaggctggagtgcagtggtgccatcacggctcactgcagctttgaattccggtgctcaagcgatcctcccaccttgtgactacaggaacccaccaccatgcctggctaatttttaaatgttttgtagagatgggtctcattatgttgcccaggctggtctcaaactcctgggctcaattcatcttcccgcctcagcctcccaaagtgctgggattgcaagcatgagttaatctttgcaagtcctaatactccatccccaatgcctcatcctcacctgggctgtcactcactctctctctcccaggccactgttcttgccctctacctactctccttgagtcaggctcagctgccttctccaagtggctgccagagagacatgcggacgataaggacctgagcatgtctctcccctgattcacatccttgggtggcacccccttgctgtcaggaagcttcctcccatggcctgtgagcccctgcctggcctggctcctggctgccttgccagcctcacttcgcaccacttcccaccattctcactgcactccagtctgctggcattccttgacttaaccaggcaatttcctaccacaaggcctttgcacatgctgttcttgctccctgggacactttttcttccactctgcaccagactaactcttatccatgttcagatctcagcttccctgacctctctcacctctcaaataaaaccttccttacttccaggaacctgtcacaacctgcgttcatatctttgtttgtgtgactatgtctctccttattcccccttggactggaatgtccacaaaggcagagatctcaacttttgttcagcaccatatcctggcacaagggagacctctgaagatacggaagcagcccactacacctaaccatccctctgatggaaaagcaatcatttagcaagacgattttcagcaaattcacccaaagctagcaaaaaaagtgttgaatgaatgaatgaatgaatgaatagcgagtttgcttaaatttcaaggaacatttagattagatatagttgttgggaggggaaaccactttctttatacgagtagaaggagcctgggcaacatagagagactcatctctacaaaaaataaaaaaaaggaaggaggctgggtgcggtggctcacgcctgtaatcccagcactttgggaggttgaggcgggcagatcacttgagctcaggagttcaagaccagcctggccaacatggtaaaaccccatctctactaaaatacaaaaattagctggccgtggtggtgcatgcctgtaatcccagctactcgggaggctgaggcaggagaatcgcttgaacctgggaggtggaggttgcagtgagccaagattgcgccactgcactccaacttggatgagggcagagcgagactccatctcaaaaaaaaaaaaaaaaaaaaattagctgggcgtggtggcatgcacccagctacttgagaggctgagcgggaggatcacttgagcccaggaggtcgaggcttcagtgagctgtaatcatgccagtgcactccagcctgggggacagagtgaccaggtagaccctgtctcaaaaaaaaaagagagagtagaaaggagaaaattaggcagtgggtctcagggacctccccgttggttaaaagtgttatgactcaggaagacaaatgccacatgttctccctcatgtgtgggagccaaacaagtggatctcatgaagatagagaatagatcggtggttaccagggctgggaagggtggggaggtgggggaataaagagagcttgcttagtgcgtacaaacacatatttaggtagaaataatacgacttagtgttcagccaggcacggtgactcacacctgtaatcccagcactttgggaggaagaggcgggcagatcacctgaggtcaggagtttgagaccagcctgggtgaccaagcaagaccctatctctacaaaaaatgtaaaaatctgctgggcgtggtggcacgcacctgcagtcccagctactcggggaagctgaggtgggaggatcgcttgagcccaggagttgaaggccacagagagctgtaatccagtcaccgtgcccagccaagagcagtcagtctgttacaaagccctctgttactgttacaaagcccctctttggagaggcatgaagtcagcagaactggctgtgcccggggcaatttccccactgtgtccacaccttctggggacttgtaggaaaggacttctggggcttcttcatctctttatctgctgccagtcatagtgccttgggtcagagaagctgcaggtttgcagccagcggaggtgagtgcgagcaagggggagcctcccctaagatgctgcagaggccccagtcctcaccccatctcccttggactttcctgctcccaggaagctgtggctcccaggcccaggccctggctcccaggaagcctctgccgagtcaggacaaagggcatcttagcggggcagaaggcatgagtgctggctggaggggaagtgggtactagggccatcctggctaagtcagcctgccaggcaggatggcagcaaagtgcaagtcatggtgagttaggcacgggcagcctcacagcaggaatgcccggccctcctagcccaggcggaacctgcctgagtcaccgcctggctgcagccccagctgcagagcctctgcagaccagcccacaccccggccatcctggaagggacacagcgggcatgccaggaggacatgccagggcacgcttgggttggtactgccagtctcttggggtctgggaagccccgtcctggatcttaacggacacggaatgcaccctcatcacacatgaaatataatgtttactcgaaaaatgcaaagaaaatttaagttttgtttcttcacaataatcacacaaatgtaattttacaaacataatacacattgtttagctcagactttttcttttgtacgtacttggtttgcccctttctcaatatgagtgtctcatctgtaatccacaatattttccctaagtttttctcagtgcttatttgacatacacaaaaatgtacatgacacactggaagctgtcagcattttaaaagcagagcctcatcatgcaccctcttctgcatcttctgaccccactccctccggggcggccgggagctggagtccattcctcctcatggccgtgtgaaagcagtggtaagcatgtagaatgtgcaagcaaccacaatgttccccgtggatgggagaccactttgccttccactttggatcaatgctccatgggccgctttgcatgtcttggcgtgtgtatttctgcgtgttagatcccagggatgctggctttgtcagtcttcacaggtgttgccggtgactatccaccaaggtggccctaaggggctgttgtagttccagctggcctggcagtgtgtggcactctgccgtttccctgccgcctagtggctggtgcattcctcactgtgcaatggccattggcatttgcccatttcttggaagggtttgtgttttccttgtcagtgtctaggagctctttgtatattacagccatctgcatcactagtattttcctgaatctatcatttatccacggactttatttatggtatattttgttatataaaagtttttataaagctaaatagaactctcctgttttagtttagattaggagggtactccttgccccaggattaattcctaattttctgctaagatttttattgttttattattcactttgaatccatcaagagttgattttacaaatgcaaatggaaatgcacattgattttctttttctttttctttctttcttcctttttttttttttttgagacagagtctcactctgtcacccaggctggagtgcagtggcacgatctcggctcactgcaacctctgcctcccggattcaagcaattctgtgcctcagcctcctgagtagctgggactacaagcacctgccaccacgcccggccaatttttgtatttttagttgagatggggtttcaccatcttggccaggccaatcttgaactcctgaccttgtgatccatctgcctcggcctcccaaagcgttgggattacaggcgtgagccaccgcgcccagcccacacgttgtattttttttttgcagatgcacaacctgtgtgccagcatcgtttaataacaactccaccccttcctgaccctttgctatgtgccaggtctgagcacttccatgtatgaactcctttagtcctcacaagcacccaagaggcagaaactatcattatttccatgagagatgaggaactgaagaacacagaggctaagtgatttgcataaggtcacacagctagtgagtgatcgagccaggtttcacccgagaatctgacctggcatccccttgaggagactcatatcctggggagtccttccccccaggtttgcaaacatattgccagagtgtggaatacggttttctccaaattctattctcattcctagtcttgaacgtgtctgctatccccattccccttcccagggaaactgcaaatcacgatgtgcccaggtctgtctcatcagtgcttgcagagaccagtccatgcgtggggtcgctcatccactctaaaagaagtatgaatgggatgcgtgttggtttcccagctcattgatttccgtttctatcaattcctagtttcttttggtgcttaaactatataggtcctttatttttgttttcctattataacacaggagtgaaagtgtttgcttttcctctgaatttgctgctggagctcaagcgagagttcgccttcaaagatgccctctacatgtgtgaggtcacctgaagttcgctgtcccctgatcctcctgaacatgagggagaactggttggatcccccagctaagtggcagacactggttttggtggccacagggggcagcccgtgtgacaggcacatgctaaggcctgccagtggaggaggtagtacctttgaagatgccattgaccacctggccacagccagccaggggcctggtagcagggggtgtcacctgagacaagccgtcctggatggcctccagcaactcagggataacatgggcttcgggagggaccctctggtccagctgccccacccaaccacccttattagctccaagtccctctccaagcctttgccaaactccccagacccactgctctcctccttttcccatcctggttccccatcttccttatctccaccatccacccaggaggcgtctgccactgctgacatgctgtcggctcccccttggtgcgagaggtaggctcccagaaagaccctggaaagtccctgccacccacaccaccaatggggctgcccccaccccaggagtctggttgggggaacccatttatgctgttcctctacctggccctcctgctggagcaccgcaaccacaccatgtgcaatgcgctggatgacaacgagctggccatgtgctttgaccgcctcatgtgaaaacgccacctggggcgtgtcctgtgctgggccagggctctctttgctgattacctgcagtgtgggacttggaggagggggctgaggccacagctacatcttgatcaggctttctccagcccaccatcagccccaccagatctccattctttgccatgagggccaacacgtgagaacccacctccctgcctgccagccctagacctgctggagcatagagcccttcctccccaggtctaagtaagtatgcaggggcctgctctgccactgccccagaggagccacggcctctttactctgtttctgctgttttaacaactatactttacacacatgaaaaaaaaagaatctccacctattaaatcaaatgtattggttattcttttatatcattcctttttattgactggcctgagagctgtgtattgacatcgcccactgtaactgtatttggatcaagctctccttacaattctagtaattttggctttgtgtatttaaccatcattttgcttagtccatatgggtctatgacttttttcctttataagatttgcttttcatcatcacatgttctaagctgaaagtccgcctgtctgtggctcacactgctggcacgccacgtctgtgtcttatctgtccacacacggaccgcccccagcccttctcgaccttgctgttccgcatgcatcccgtcaatcctgcagagctagggcttgttttcagacaatatcctgacagcctctctttgtgtaatggctgaaatacttggggttatcctctcaatttccccctgtatggagcggtttacttcctccggttatttcctcttgcctccagtgctgttccttccacttcccctggcttgtctgtgagttcttcctacctttccgctgtgtcgatgggtcctcccgtctctgctccgtaatcacaggcgcatttctctacccactgtttcccactctgggctgccctcctttgccaggacacgagcttcagactcacctccgctccactgccaccccaggccttggctgtagcatttgggatgggcacccctccccctccccacctctgtgccccaaggtttttgccccccacttaaaactaaaagtacagagccctcctgtacttttagttttacactattatttggcccaagtgaggtatgaatacaaaatgacttttttcccaattactgcctcccactgtcccttgtccaacctttattatccatccctaggacaccccaacagctcccatcccttcctggctggtgtcccatatcaaaacgccaggtccaggagaatttattaagctgaccctagtgaatgcgcttctgcccagcctggattgggcctgtggccctgaggaaggggacaaggaaggcctcattaccccgcccaccctgggtctccctttccctctggaatatcggctggtaggagaaaaatgggcaagagcgaaggacttctgacttaactggtgctcctgggaggtgctgctcttcacagcccctgcagtgcttacccaccactgggttcctggagagggagggagattcctgctgccccccatactctccgccaagtaccttccatggggcccctcacctcaccagcaggtccctggccatggcatcggcaaggtggcccacccagcaagcctcctggggtgcagctggcccagagggagcgaacgcattgtccccatgcaagacgcctgtgcaggcaccgcactcagcccctctctgcccagccatctctgtctcattcttttttcttgctcaaccagctcaaatgacacagacggtggctcagctagtcctttgtatgagaagacatcccaacgggcaatgaaacgccacccctttccttgcaggtacccccatctccatcagggagtcccttggagccccatggttggcgcagagtggtggggagcccatctgtgtgtgagggaggctccagggaaggaaggaaaaaggtcctgtttctctcctgttaggttcatgattccttcaactctcaccagctctccaatgtctagttttctgtttacatggcagagatgctggaagatatggaagggccggctctgctccctcatccttgggagaggtctccacagggcaaaggcccagagcacacgaaggatgtacagagcccaagatgatggcatttcaggccttgggacccctggtgatgggtggagagtgggtgagtctcccagtgcctcccaaactggagcacgctccattccagctgtgtccttccgccccataatcactaagacaaccacagagccccccagacccattcaaaaccatccacaaaaatcacatacaatggaatattattcacccttaaaaaggaaggaaggccaggcaccatggctcatgcctgtcctcccagcgacccaagagactgaggtggaggatcacttaagaccgggagctcaagaccaacctgggcaacatagtgagacacccatctctacaaaaaaagaaaattagccaggcatagtggcacatgccaccagggttgcttgagcccaggagtttgaggctgcagtgagctatgatcgaaccactgcactccagtggtgggcaacagagcaagactctgtctctaaaaaaaaaagtaaggaggctgggcatggtggctcatgcctgtaatcccagcactttgggaggccaaggtgggcagatcacttgaggtcaggagtttgagaccagcatggccaacatggcgaaacctcaactctactaaaaatacaaaatcaaccaggcatggtggcgggtacctataatcccagctacttgggagactgaggcaggagaatcacttgatcccgggaggcagaggttgcagtgagccaagattgtgccactgcactccagcctggatgacagagcgaggctctgtctcaaaaaaaaaaaaaaaaggaaggaaatcctgacatgtgctacaacatggatatgaaccttgagtgaaataagctggtcaccaaaggacaaatcctgtatgattccacttacgcgaggtacttgagaagtgaaatgtatagagacagaaaatagaatggttagaatgatggttgttgggggctgaggggaggggaatggagaatgagtgttgaatgggaacagagtttcagtgtgggaaagataaaagagaatgggccgagtgtggtggctcacgcctgtaatcccagcactttgggaggctgaggcaggcggatcacctgaggtcgggagttcgagaccagtcttgacgaataagcacaaacgcattgcctgaccaggtctgttcatggaggcctgagagggtgcgatgggtggggcagagctggggtgcgatgggtggggcggagctgggtcaccctgaatgcagggcggaggtgcttggactgtgttctgggggcagtagggagcacagagtaaacttcaggtggacgtgtattagttggcctctcctgcaaatgacaagcaccaagagaagatgctgctttggccctctgggaggagccctggtgatgcaggtgtaggagcaagctgtggcgatgcaggtgtaggagcaagctcggggcctggggaccgctgcatgagggtgtggtctgtctcccttcctctccctctgccctccctgccccctgcttgtctctgcacatctgcctcattcctcctgcctgctggaggagaagcgggaaggagacagggagtgtccatggactcccatgcctgtgctcagtgaggccccacactcacacgcacagccctagccccgaggcctgcttgccaccaaaagcaagcatctcaacacgtggcctaatgccttcctcctgcacgaatccatggggcctcactccccactcacctgtcatttcgagatttccacgctccctgctccttggctgccccgccccacgccccacccctccttcctgccaccctcttgtccatccatccacccaaaccctgcctctgggccctctggaaagcacagtcctcctcctcccttcctgaacccgaaatctgtttgcccaaaggaccagggcggcttccctgcggccctccttcccaagggtgctgcctttctccaggcccctcacgcctcaggacctggggtggagagggctcctccaagccctgtggtgcatccaggccgcaggacagtgcttgtctccacaaatcccagctcctcggaagctgacaccatggcccgaggcccctcctctctccctctcccttagggaggcccacctggccctcctcactaagatgctcagcgccagagccctcggcttctgatctcatctgcaccgactttttcttccatgcgccttcagctcacactgccaaggtcccactgtgagcgatgagctttacacagtgacagccctggtcaggagaaaggtgctctctcataactgatgatgcctgtctggggccagcaggatcagagctggaactaaggaacaaacactggcaaacaagtgccttatttttccatgtagacctatttttttcatatttcttttgtggtaaaaatacataaaatagattcaccattgtaaccgttttcaagtgtagagctcagtggcattaagcacattcacactgtgtgcagtcatcagctctatccatctccaggactttttcatcctccccaaactgaaactctgtgtccattaaaaaaactccccagagccactggaaaccaccattctcctctgtctctatgaacctgacgactcagtgcctcatggaagtggaatcatacaaaatttgtccttctgtgtctggcttctttcactcagcgtgatgtcctcaagatgcatcccgtgttgcagcacgtcaggatttccttcctttttcaggctgaataacatcccaccatctgtctatgcctcattttactcctccactcaccagcccgtggacacttgggctgcctccaccttttggctattgcaaatcacgctgcaatgaacatgggggtgcgaggatttcctcgagaccctctttcgcttctctcaggtatataatcagaagcagaattgctggatcatgtggtaatcctacgtttaactttctgaggaactgccagactgttctccacagcagctgcaccattttaacattcccaaccgccatgcacaagggttccaatttctccacatcctcacaacacttattttcatggaggttacttaatcgctacagtgaacaggcaggtctcagagtttgccgtcagaaaaacaactctcttttctctcctctgagctctgcagctagttcttcctggaccttgggacgagaactggggcaagtccatgatgttccctctccgatcatgaataacaacttgatttcagtcagttaaaaaaaaatgcctgttggggacgggcgtggttgttcacacctgtaatcccagcattttgggaggccgaggcaagcagatcacctgagatcaggagttcgagaccagcctggccaacatggcaaaaccccgtttctactaaaaatacaagaaaattagctcagcgtggtggcacacgcctgtagtcccagctactcgagaggctgaggcaggagaatcgcttgaacattggcagcggaggttgcaatgagccgagatcacaccactgcactccagcctgggcaacagagcgagactctatctcaaaaaaaaaaaaaaaaatgcccgttggggtaatccttggagcctcttccaagtacctcaccccgtgggcctctgcagctgcaggtgctgtggtgggcaggaggccctataggcttctcagcctccccaccttgctcctccttctcctcctcctcctcctcctcctcctcctcggcctcagtgagcccgggctccactaagatcacagagggaaggtaggcaaaggggctggggagcagctttcttgtctcgcgccagtctcaggtggtttcttctgaggtccgaggcttgctcgctcacacagcagcttttgacagcctcccacaccctctgttcccaaggactgctgccctgggctccctttgacggaggagatgccatctctacagacggctcatgctcctctgctgctccttagcctctgacagacaccccctgctttcctgccaaggcccccttaccccaagccctggagcagccatgttggacaggacccccagctctccctgcctgcgtctctgcccacatcgcccccttggcactgctgcacagtctttggcctacaaagtgtttgagagcagctggccagaaatgaactcctggccatttgatttttcaggcagcagacacccacctagcatgtcccccaagcttcagaagatacatagaaaagctctcccaaaggtgccaccaaggaggggtgccagcagcctcagccctccatcggagggagacgctcaaagcagtctcacttagcatccctcaaaagcagggccggggaaggagagccagcgcaagggcaacactgagttgggtcctggctatttccgcgggggcgcctgagcaacggtctggctggtctcccctggcaatggtgcacccggaggactcagcactgccctctgctgctggcaggttgagcttagcaaaatcagcctgctgggcccacgggtagcctgcagctccttcaccatggcaggcttatcctgggctcacggtgcaagcatcagggtggccaaggatggaggccagttgaccttcactggacaagtcgtcctgtccacctggtttgtcctgtgcccctctggtgggcgctgacactaaacacagtactgtctgctcactgcctgggttatcacaagtcttctccagatcgccttcgctccaacttgccaatcttgcttcttctaagcccctgaccaatcagcaaagccatgcaccactgcccgcatgtctgtgtctctccttccccccagcctctcctctctatacaaaggctatgccaggcacgctgctggaagctctgcccaccttgcagacagggtctcctagcatgtgacctagcttcaccaatccaacaggccgacactggaccttaaaagagccaagatgtggggacctcaggggtttttctctctgacagcagtagtggttgccacaagatcaaatttcccgagaggcagcggacacagtgtcagcaatgcattgacatcctctgcctattccagttctgcagcttcatttctgactttttttccccagctctccaggcctcccccaaattcttacaaatagcctttaaaaaaaataacaagttcttttctgcttaaataagccaaagttgttcctatgttcccatttttgctaagctgcacaaaatggccataggaattcctcccatccctgtatgtacagagctttacaatgtgcctttgctataaaccccatcaatagggggatttctccacctcctgaatctgggcttggtcatggggcttgctttggccaatgggacactggcaaatatgaggcacagagacacgtagggtgctggtgattgcgccctgggacttgctctccacctaccatgggacaccaccatgtaaacaaggctgagctggcctgccagatgatggcagacaggaggccaagtcatccttgatgtcccagctaaacatcatgcaagtctacaaacccaagtgaagttgtcttagaccactgaccaccagccatgttgactcagaccagaactgcctaactcgcccataagcatgatgagaaataatacatgcttattattttaagccattaagttttggagtggcttgttatacagcaaaaattaactcatacactttctagcaactgagaatactgatagatacccacatcctattgatctccaaggcattttaactcctactcatctattgaaatcatccatcattctcatgtgagtaagtttcatctggtctccctgaatccatctgtgcccctctcatcttttctgcaacctgccaatctgattaagccacatcccatgcttaaaaatggctgcaaggctgggcacggtggctcacatctgcaatcccagcactttgggaggccgaggtgggtggatcacttgaggtcaggagttcctgaccagctggccaacatggtaagacaccatctctactagaaatacaaaaattagccaaacatggtggcgggcgcctgtagtcccagctactctggaggttgaggcaggagaattgcttgaacccgggaggcagaggttggagtgagccaagatctcgccactgcattccagcctgggcgactgagccagactccgtcttaaaaaaaaaaaaaaaaaaaaaggctgcaagctcatcaacatacctctccctctctctcttcccacccagactctctgacctgcagtcacacagtgacagtgctgacagcctgtgttctgttgtgagctgaaatccccgacttgctcacatatacataaacatgcttaaagctgcacctaagcagatccatctgcttcatttacatctagagatgggctgtaagaacatgagctctggaggaagcctgcctgagttagaatcctggctcagggactcaccacctatgagaaattaagcaagttacttaacctctctaagcttcagtttcctcatgggctggctgtgggttcatataaaatgcttagaactgtgactggcaggcagggcgcagtggcttacacctgtaatcccagcactttgggaggctgaggcaggtggatcacctgaggtcaggagttcaagaccagcctggccaagatggtgaaatcccatctctactaaaactacaaaaattagccaggcgtggtggcaggcacctgtaatcccagctacttgggagatttaggcaggataatctcttgaacccagatggcagaggtgcagtgagctgagatcgcgccactgcactccagactgggcaagagtgagactccgtctaaaaaaaaaaaaaaaaaactgactggcatggggaagacatgcagtgtatgtcagccattattttccacaaatatcagatatatgttgagtacctactatctcccaggtactgtcctaggagctagggacacagtaagacagtaaggttcctggctttagagagctgacattttagtgaggtgataataataataaacaagtaaaaatacacacaagatgatttccgaaagtgattactgcactgcagaaagcaaacctgctggcctttgcacatgctggtccccggctcagaacactcccctctccgccggcttcatgctcccttctttcctgacttccttggctggtccagttcccctcccacaagtccacataacaacatcatctacctgtcttctgtggcattagtcacaattgtcatgttgtctttatcaacgtcctatctacagtgtgtgcctcatgagggcaggccatgccctggcgttctcccttgtgtcatagtatagcaccaactcagagcaggtgcttaacaaatggcttcgagggcatgaatgacaggaaaaaaagacccaatatcaagccaaacatcacaatttctcaaaatttgtccattagcctctggcataggaaacatccagggaagggaactcctaccctagaccccacctgccccacatcagacctcctggcagcaggctttttttttttttcttttttgagatggagtttcactcccgttgcccaggctggagtgcaatggcgtgatctcggctcattgcaacctctgccctctgggttcaagtgattctcctgcttcagcctcccaagtagctgggattacaggcaccaggcaccacacccagctaatttttgtatttttagtagagacagggtttcaccatgttggccaggctagtcttgaactcctgacctcaggtgatctacctgccttggcctcccaaaatgctgggattacaggcatgggccaccaagcccggccagaatctttttcttctatgcgctagtaggcctgaggtcttacctttctcacctacaaaagcccatctagagcagtcctccacatggggcaccccctgccctgccgagcagaggcaggccccagaagggacgtgtgttgagggcagcccttccctcctgggggtggcccttagttctgcaggtccgagtctccttaggggcaggctcgctccccagccccttctcaagccaagggcagatctgaccagccccaagaggggatcgaggaatctttggggcaagacagcagagcttctttggggaaaagggacttgaggactcacctcactgcttcccttaagaagggagatgggcttccggggagctgggagtccccaacatctagtgacaggggggcaccaagagggcagctctcacgttttctgtgagtttgtgccttttctgaggttttcctcagactctcaaaggggtccctgctggcgaccccttgggaagaagttacctcactgtcccttctcccctccccatgcaagacactgtcctttctcagggagcagcctgagaagcctcactgcctgggggcgggcgccctctgccggttgagggctggcccaggtctggctcagcccacggggcgctgctggcagtagggctggtcggggagacacatggggctggacaggtgtgtggggcctgacctaagctccttctccaaaggcagagaaggcactgaggtgggacatgagtcccaggggtggggcctgccgctgacagtgtgtggctgtgggggtccagaggcacatgacctcaaaagagtttgtttcaattcagacaggcaagggctagagtacacattttgtatttaaaaaacagaggacatagctaaaatatttatagaggatcgaccccatggttttttgtcagccccacagcaaggaaccagaacttggttttgcaaaaatcaatatgcttacatagccctgctgagagacagggcaacagcccaaggcctggctccccggcactgtaggcagctgttgctaggaacaggggcatcagatcccagcatggcagggagagcttcactttgcttgctgccaccatttgttgagcacttgctaaatgccaggcactgtgcaaagagcattttccccacacaggtaggattagaaagtagtagtcctcttatcttctctaatggatggaaaaactgaggctcaggatgggaaggtaacttgtccaaataacacacaggaagattaaaagtagaacacctcatttctcaaagcagcagaaaaacaagtatgttccaaaactaccaatggagaaaaatttgcatgctgtaaactaacagttcattaaattctgtttaaggctggatgcggtggctcacgccggtaatcccagcacttcaggaggctgagactggcagatcaccggaggtcaggagttcaagaccagactggccaacatggcgaaaccccgtctctacaaaaaatgtaaaaattagctgggcgtgatggcacaaggcctgtaatcccagctaatggggaggctgaggcaggagaatcacttgaacccaggaggcagaggttgcagtgagtcaagatcatgccactgcactccagcctgggcgacagagactctgtctcaaaaaaaaaaaaaaaaaaaagaaagaaagaaaacaatggaaaattccagaaataaacaattcctaagttttaagttgcacaccattctgagcagtgtgatgtagtcttctgccatcccacttgggacacaaatcattccctttgtctgtcatgtccacgccgcatatgtgatccaccctatactatgtgattgtatagagaaaaacagcatacatatatggtttggcagtttccaaggtttcagacatccactggggggtcttggagcataacctcatgaataaggtgggactcctgcagttgcgacagagaccagacagtcttcaaaacctaaaatatttgtatttttcagtacaggaaaagcttgtcaacccctggtctacacacctggttatcttggaccatcctgccccagacttcctccgtaacaacccatataatgtttctatgaccatagacgtaaaaggaaactgtgacctttaccaaaataagcaacttatttttcacaaattacttatgtaataagcatcctgtttccaaaacagacctcagttttcaggtccgttttgaattgacatttgtcacactgctgactcctttgttactgagtgaacgatatattcttgagaccaatttttctaagaaatgttattttagcacatgttccatggaaaggagggtttacgtttccaaaatacagatgtgacaaagaggaagcacatctgatggccaatgaggagaaacaacagagtggatcctgaggcctcccgtgtcctttcagcctccctctgctactcccactgctggccacaccagcctcagggagggactgccatgtgcactttccacggcagctcatttaactcttgcaggaaacccaagaggcatgttgtgtttctgtctctgctttactgacaaggacagggaagcccagggagtgaggcgtctcacccaggtcagtgtcggcgcacacaggaggcaaccagggcatgtggcagggccccacaggacaccagggcctctcaaacccactaccctttcaggcccctctgctgctcaccattggtgaagtggggctgtcaggagcaaagagaatttctggattttctcctaacattttcccctactttaacctcccttcatctgttgaatttactgcaaatctttcctagtcttttagttttcctatacttaaaaaaaccttgtttttaaaaattacataattaggccaggcacagtggctcatgcctataatcccagcactttgggaggctgtgggcggatcacctgaggtcaggagttcgagaccagcctggccaacatggtgaaaccgtctctactaaaaatacaaaaattagctgggcatggtggcacgtgcttgtaattccagctattcaggaggctgaggcaggagaatcacttgaacccaggaggcagaggttgcagtgagacgagatcacgccattgcactctagccaaggcgacagagtgagactccatctcaaaaaaatacacacacacacacacacacacacaaagttagccagccgtggtggcacacacctgtaatcccagttagttgggaggcttaggtgggagaatagctggaacccatgaagcagaggttgcgtgagctgcgatcgtgccactgcactccagcctgcagcctgggtaacagagtgacactctgtctcaaaaaaaaaaaaaaaatttttttttaattatataagctcatggtgaaaaatatcagcattatggaatataaaattaaatgtctcctgtaatcctagcactttgggaggctgaggcggtggttcattgaaggccagaagtttgagaccagcctggccaacatgctgaaaccccatccctactaaaaacacacaaaaaattagccaggcctagtggtgggcacctgtaatcccagctacttgggaggctgaggcaggagaatcacttgaacctgggaggcggacgtcgcagtgaactgagatcgcaccactgcactccagcctgggtgactgaacaagactccgcctcaaacaaacaaacaagtctcacccaccctctaaaataattcccattttccaagtccatcagacactacagatagggaaggaaaacttattccattggacacccacagatatatctttatcatcttataaacacttaaaatgtattcaaaccttttgtgcatactttcatcatattgtaggaaagttctcccaaagagacaggtgtatgggggtgctgttttctttctcagaatgtaaaagggatttatgaaaacaaaactgttcgtgctcaaaatattctgggtttctactagaaactaaatccattttccaaccacaaggcattccatatcaaatcagcagcctgcactcttcctgctctttatgagaattcctacctaaatcagtcatctttggtttagctccaaagtttatcaactcatcttcatcttcactgaaattttccagaggaagtggagcaataacctctagccacccagggcccctcagaagccctggctgtaggtttcccatcattgcttcctgaagggaatccatgtgctagacaagaagtcactttattgcccgtgagacttgggagaggccttccagagatctggccaggctcagccactatcttcttccccagcctctccctgtagtagcgggtgggggtgccagtgtaaacaagggcccccatgtgggctgagatgggaacaataggacagaaggtaggagaaggcagcagctgggtggacttggtggctggagatggggttctacatgccatcctcgtcctgcgtaagccaaaggggactggcactgaaagctaggctgggcaggccgaggtgagaatgggagtgcacgcagcctcagcagggcagcctctaaagggctttcctggagaaaggggctatgtctactgccatcagtgaaggaactggccccagcaggcggcagggcctatggcaggggagggtcctctgggcacatctagacttgagagtcctcccacttcccactgaaacaattccctgctgctcaatctcactgccatatgcaaaaacaagcaaacaggaacacttaaaagtgggtcgatcaaatgcttgagtttattaacatgtctcccaagtcttttttactgggagtttcagggtggtctctgaaatccattgctgttgagctccaactccaggccccatggggttgcaccaagctgctcaacctcacctgtttcttgaaattttgctgccttccactaggcagatgggtccagcaggagacattggagcaccaaatggaaaagctcttccttccttcccctcttcctgtacatcagaaagaatgcattagaaactcaaggagtgagcatttgggcttcctaagggtgagacagtgtggggctcctgtggggagatgggtactcctgtacccagtgtggcctcctgctcccaccgctttccagctgtggggcttttccttgtggaaattactgtccaagtttgatttttccatctgtaaaaggaggcaagtaagggttggtatgaggatcaaatgaattaacaattatcagactgacacaaacattccacttaaacagccaaattgacttaaaagggcaacatagatgtctgaagccagactgcctggtgggcaagctggagaaagcaacttctatgcaagaactgtgtcctttcagaagctccagccagagcgtacgtggttggagagagccctgaagacaggccttgccccacacaaacacagaacaaattgttctccaccccctcccaaaacaaaacaaaagcagtgaagagccacagagtgatgaccactacaacggatacaggattgctgagcccttccacgtgccaggggctgggcaaagaatttcatattcattaacttatttctcacctcaactctgtgagacatgcactcttcccccactgacagattcggaggaggggaggaacttgccaaagaacacacaactgcacatggtggagctggaatttgagaccaagtggaccactaagctacctgccaaattgagttgcagaaaccccaaaggaggcatagaacacggtttccaataaacaagagctcatgtgggcacttcctaatgacagaagctaactgtccaagagcacgactgtcttgggacaggagatcatgctgcagagcccagggaggtccgccctgcgcagagagggagtgcagacctaaagagagccacactctgtgaaaagtggaaaaacctacagattgatcccacctgttcagagcaacaggcacggcttcactcgggaccacatgtgcccaggggctccacagggctgggtcctggctctggccatctctgcacagcctctgctgggccactctgtgagaggtcacgctggcagcaagatctcagcctctgctcctttccctagtacagtttgatctctgaattcactttgatcttttaccagttcggcttcacctcttgcaccaaagctgtgatttctcagggcaagttgtcagctttcccgtatgcagtgtttttctaggtggattgtttctgatgtggtttcctctgatgcaggtgagggaagtatcatcttgactcctccaccaataaaattattctcacagggctttactaaacatgagacttgggagggacccaagagcttgcttggctgcagattcaagggtccaggactcagaaaaaagtggtctgaggccgtctagaaataggcacagatacttccaggatgcatgtaacaataccaagttctctgagcagtagctactgcctgccaaataatcctccttgagaaatactgatcaatcttgctttattccagaaagaatttaagactgcttatagaaaatacgagggagcatagtttaaaaagtgtgaagtcctcctccaaaacatgtgctaaccactaatatcaacattaaggatagcccgggcgcggtggctcacgcctgtaatcccagcactttgggaggccgaggcgggcggatcacgaggtcaggagatcgagaccatcctaacacggtgaaaccctgcctctactaaaaaatacaaaaaatcagccgggcgtggtggcaggcgcctgtagtcccagctactcgggaggctgaggcgggagaatggcatgaaccccggaggcggagcttgcagtgagccaagattgtgccactgcactccagcctgggtgacagagcaagactgtctcaaaaaaaaaaaccaaaaaacaaaaacattaaggattttggccgggcacggtggctcatgcctgtaatcccagcacttggggaggctgaggctggtgttcaagaccagcctgaccaacatggtgaaaccccatctccactaaaaatacgaaaaatagctgagcgtggtggcgcatgtctgtaatcctagctacctgggaggctgaggaagaagaatcacttgaacctgggaggcagaggttgcagtgagccaagattgcgccaatgcactccagcctgggcaacagggtgactctgtctcaaaacaagccaacaaaaaaataataaggattcttcagatatctgagtccaggtcctcatgtccactgtgtctaactcaacttattactgtgcagactgaggcaatccagccctaaaaatcctctcctctcaagctcctggacgggactctagtgagggcagaactgctgggctggtaattcctcttggtggagacaaaggaacatgggactacgggcaataagttacttatcagtcttcactagaggttgtttctctcaactaaagttatcaaaattgggtgttgtaatttttaacttgatattcccagacaagtgccaggagagaagctgttgcaaatgctgagtggagaggagaaagcctcagcagagaggcgagctggagggagggatggatgctatccttctctggactgaagcagttacaggatggctgcacagagtactcctggcaggcagaagggggcgtggggacccagacacttaagatgcatgggtttggggtacccattccaggcctcatgtccgctgtatccaactcaatttcctcttaattactgtggagactgaggcagcccgaccctaacagtcccctcctcccggctcctattcaccactccagcgagggagaacaactgttgctctagttacttctctcaatggaaggaggggacagggactgtgggaaaccaactatatacagcataggctctctctctatatatagtccagtggagggtatagttaaagcaaacccttagagcaggaatagctggtcagcaattttccaggttatggcttgaatacaggtgtcaacccatgaatgtatgaactggtacatttccactctatgaaacacgatatgaaatttaaaaatactcagggaaacataaagcatttgtttattattgctatactcaaggcaaaatctcttaattagccttgataatggaagtataaccagaaccattattcatgaatttacattttgttcttttctgctgttgagacttcactgtttcacacacaccatctaccccaagacctttaatatacaagaacaagaagaattaacttgaaagtcacaaagcatggcttgaccacttgcctagttcctgactttaggccaatcacttcccctctctgaacctgtttcatcctgtcttaaaaaagaaatgggagaggaagaggagaggatagaataaacctacaactgagataacacaggtgataactgaaagaacatgaatgaaatttcactgtgaataaaaaatattatataaaataaagtatcactaataacaaatagggttgtggaggtaaaacagtctatgttcctggaagcctgcatgacagtagccaagatctaaatcctggggcaggacaaaggatattcatggccaagtctctaaactcactaaggaagtacctggctcaacaagccacttaatatgtacccagctacaccctagaaacactttgtcagttttattttaccttaatatacatttgtacaggcaataataaaaaggctattacacaacaattcagtgagttttacctagtttcaagaataatgcatgcagttacaaatgagaggtagaaacactgtattaaagacctaaaaatacaaacgtcatataaataaatgttcaaattaactactggaatttcatacagataaataaggtaaaaattacattactttgtcaaagtaaaggaaaaccatgtttgtttttatcagtacattaaaattagattaatgccaaagagctctgtgcaatttgtcaaagagttcagattattttatgtaaaaggattaaaataaaaggattaaaattggtgaatggtttattcaagtattcaagcaggtaagtaaaagaaaccaagtaatacacaacgtaggaaccattcctggagggatattaagttaactgcctgcattctccatgactagctatttggtgaactgtcagaattaacatgaaaaatacacattaggcagaagacagctgcccattttcctaagagaaaacgaacttcattttccactcactgcatgtaggaactccacatcactaacaagcctttaggtcaccaactttgttttggccctattcaaattatcaagagtatctcttgatccatgattttgtttctaatactgcccaaataaacctagcctttaataaacctaaggtcacaggcatcaatgtacattctgcatgcacaataaaaaatggaaccaaaagctaacaaaaacattactgagaaaatctgtaggtgtagataaagaagtaaaaaaaaaaaatgtgcaaaggttcacatgaatacaagttttaaccacttaaaagttcactggagattacatgtgaattctggaaagggtctatgtatacaatcaagtaaaatattttaaacaagtccattgtgccttagttaaattacaaaatccaatacacagttgttttaataaattagtgcaatatgaaagattttggaagattaacatgtatccatattaggatcaaattgaagatttcaaaatttcttccaagatccatgtttcacttcttcttaagctatttcttcctgagctgtttaaagatgcatgctcagatttaaacaaacttactccaaatatcaaactgcctggatgaggggtgaatacatttacctttacacctcagcaaacacatggaatttcacacactgctctgatgaacccagtgacgagcactcactttgtttcatttttaattatctttaagaataactgtaccgattatcctagttctaaggtacatttattcaccaagtccaaactgggagccaaacactcttgctcctgcttctacaaagaaaaagggaaagggtgattttctccaataaggcagatttcctacaaatatgtagtttttggattgtttttcctttttcaaatcactgcttgttctttggtagtcaccagttaagaagctacagtttcctggggatggggtgacagaactcaagctgtaatcccaaaggcatcacctcacgttcccaccaccggtccacgggatgagcctgctgctcacacggttgcggtgctatggcagagcgccgacagtcttctctcaatactacatttatctagaaataaaataacaaaaatgaagaactaatgaaaaaaatcactatattgtcatctctattctatctttgccccaaagttaacagttctgaatatgttttcttctttctgcttggtaatagtttagatatgacttctagcttagtgctgcaaagtggtaaaatttaggtaagcacatcagctagcttgctacataactagcttgctcataactgcaaatactcttagaactgccatcctcctgtggctactcaaaatgtagcaggaccacatacactccaaccagtccaccacctctgcctaaaaaaccagattattgggcttgtatgtgataagtaataacatcctggtatcccatcaatctccagtctgctatctataccaagtctgcagtacacagaagtttcacaggactctttagtcactaagcccatgaggcttaaaacagttacatttaataataaaactaaagtcctcctacatatacgaacacttgccaacaaagtaacaccgtgtagaaatctaaagatgaattacgcagtcaccagtgcttttcatgcatcacctgtaatcctcacaacaaccctgcaaggcaggcactgctgtatctatgtatctatctagttatgcatctatttatctatatatctatctatgtatctatgtatgtatctacctacctacctacctatctacctacctacctaactacgtagaatggagtcttgctttgtcgcccaggctggagtgcagtggcacaatctcagctcactgcaacctccacctcctgggttcaagcgattctcctgtctcagcctcccgagcagtggagcttacaggtatgcgccatgatgcacagctaatttttgtatttttaataaagacggggtttcgctatgttggccgggctggtcttgcactcctgagctcaggtgatccgcccaccttggcctcccaaagtgctgggattacaggcgtgagacactgtgcctggccctactcctattttatgaaaaagaagctgaggccacacaaaggctgtgatttgcacaaggctggaaagccacgattcaaaccaaggcagaattccaaactccaagctctttgtactatgcttgtgatagacaactaaaatgaagtaaaaaaatacactactttgtaagtcaacttacatttatgcacattttcaatatctgcagggtcctgtagaatcctacttaggccttccaaaagaagggctgccttatgatagcgataaacaatatcttcggtctgctgaaacatctcatccagggctgcagactgaacctggaaccagtcaacaaaaacacaattctctcaatttttccaagaaaatacaaatccatttgggcaatgaagctttaaatggaatccacctaaaattaacacattttggtaaagtgatacagtctgcaaaactacataaaactcaaagattctttgggatgagcaatatataagagcaacttcataaaaagtcggtctgctttcaaacacagccttctggtattcagaggtatgcttcataaatttcatactagaacccttctaaactggctcttttatgacttcattataaattgattttaaacacacacttccatataagggtaacctgaaatttcattaaagtagattttgtttcaataatataattaaatgatgctaatagtcacttgctggctttactggcttctttttctagccaaataatttttgggtgtagtcattcattcattcaaagatacttattgagcacctaacaaagtgccaggcactgcgcctacaatgaaggagagcttgcagtctggagggagatacagtcctgcaaaaaatgcaattctaatgccaaggcacacacggtgttacaggaggaagcactggatgatacggaatacataggggatgcctctaacctatattacggaaggagaagatgattaggggaagcttccaggaggtgctgtttgtgctgaatcataaagcaacaacagcagaagtgaatcaggtgaggaaaaatgtgggaaggggctctccagaaagaggggatggtagcattattcacaggggtttccccatcgacattctgattttctctttgatcattaagtaccagaactctcagaaatccagtatccgaatttacttgttaatatgctatatcttgtttttgtttttaatttttaaaatgtatttatgcattcttatatagatggggtctcgctctgttgcctagactaatcttgaactcctgagctcaagcaatcctcttgtctcagcctcctgagtagctgggactacaggtgcatgccactgcacctagctattctctctccttcaaaaaaaataatttcaagcagctaacaataaagcaaataaaatggatacagaagatcagagccaggacaaggaaaaagaaaaaaataactaagtgttaatgcctctaagctcactaagcagccaggacgaacggaggaatttataagttatagggctctttattctgagaaggaaaaacagcattataattccatatggaggacatttttctggtgcaaaattctaaaaataatttatcatatgaggtctcaactcagcatacagtgatgcagtgcatattattcatctcaatagtttacagcaatatgatatatactatttttgtcaagaatttatattccaaagttattttcctatggttattttaataaatttcaaaataaggccacggatgtaatataacagcacagttcacagtagacaaatagaaaatggaaagggggatctattatgttaatgtgttagaaatacaattggcatgccgggcacagtggctcacacctataatcccagcactttgggaggccgaggtgggtggatcacctgaggtcaagagttcaagaccaagcctggccaacatggtaaaatcctgtctctactaaaaacacaaaaattagctgggtgtggtggcaggtgcctgtaatcccagctacatgggaggctaacgcagcagaatcgcttgaacctgggaagcagaggttgcagtgagccaagatcatgctgctgcacgtcagcctggacgacagaacaaaactccatctcaaaaaaaaaaaaaaaaaaaaaaagaaaaacatatgattggctaactaatgaattttcccccacttaactactttttcaacagcctctatttttatttatactttagagtaatttttccccgagaggcagaaaacaaattatttccaatattaaaaccagaaaataggaaaagaaggttttactttgtgtctatcctacaatatcagtaagtgggacctgagcacataaatttgtgtggattgattaataaagcagtgtttttcctaagagttttatcaagcctaactttcttaaacagcagaaaatgcagaaacagatcctgctaatgcttttagatgcacactataaaaagattagatcggctgggcacggtggctcacatctgtaatcccagcactttgggaggctaaggagggtggaacacctgaggccaggagttggaaaccaccctggccaacatggcaaaaccccatctctactaaaaatacaaaaattagctgggcatggtggcaagtgcctgtaatcccagctactcaggaagctgaggcaggagaatcacttgaatctgggaagcagaggttgcagtgagctgagatcgtgccactgtactccagcctgggcgacagagtaactccgtctcaagaaaaaaaaaaaaagaaaaaaaaaagattagatcatgcctaatgccagcaatgtttaataagagctgtaataaacttatagcaaatgtggtaaacggatttgtaattacttaaaatacatccagtaaatgacattaacagttgcttaaatccaattacttctttagtagaaggcaatccacaatacttgggacttgagacattatcttttaaaaggatagctgtcatatagatattcaattaaaaagacacttaaagataagtagtactatacaatattaaaccttagaaagggttaccatttctacagcacaattatagatgagtttctctgcagtcacactgttgatttcatcaataaacctctgtttgtcagagaagaatcgattcagcttttctgtaagtttcttgcacatggtgatgcagaatttatatcgttcgttcagattcttgacaactgaaaaaaaattgagatgggaactaattttaattttcctccagaaataaagacacagttatatgtatctttcctgctgatatatagggaaggtgtcactatgtgatcattcaaaaaaaggaccagaaataggattttttcatgttatctctttcaatatgaaaagattgagaataatgcacttcagacttctatcaattgaactgcaaaaagctaacaacccagcatcttttccctttaagaatactgaaaaataaaaacaacagtgagtactcatcagacactctctcacagtgtgatgggaaagagcaacttaaggactgacccctggagttacacgctgccttctcccataccttgtttcacagctgtggatgggctcagtttcccggacttgatctgggctttggcaagatgcagagaagccgcaagcagctgtgctgctttcatgtacaacaccagctgctccacccgcctgcacccaaaagacagtagcagagggttatcttgtgaactaatgtaagatgtggcactctacacaacaggtcaccattaaaattgcctttctataaaggaatagcatcctctttgatttcttttcttctttcttttctttttttttttttttttttgacagagtcttgctctgtcccccaggccgaagtatagtggcttgatcttggcttactgcagcctctacttcctgggctcaagggatcctcccacctcagcctcccgaatattaatagttgggaccacagggacgcaccaccatgcccggctaatttttgtattttttgtagagacagggattcatcatattgcccaggctggtctcgaacccatgggctcaagcaatccttctgccccatcctcccaaagtgctggaattacatataggcataagctactgcgaccagccctccttaatttcttaatgcacaagtaaactctcaagggacaaggcatagttaaagatgtgtgtactgtgaaaataacggatacactcagataaaaatcaatacaatctatttacacaaaagaacttcaacagtataatttacaaggaaaggcaacactgaggttgcataatctccaggtcttggctcatatagtgaaatgtagtacaaagaaataattgagactcctagcttttaataatgagatatgatcttcagtggatgacaatacctacaacttagacacaagtttagacaaagcatgaaaagtctggaaatgaatgacaagggggcacccacccccagtctttgctcagctgactgatctggtccaccaccacactctcctggatctggtacaaggacacagcagatgtgcacagctcagggtttcctcccctcatggctgtcaggtccagcacacactcagtgaacatcagcatcacattcagatggcgtaaggtgtctgtgtgttcccgctgcagcaaagtcaatttgtcttagaaaatttcagattaaaaatacgtacatactcatttctgtacataaaccatggccgctgatcatgttttctatacttatgagtatcagaatgacaaaaggagattgaaatttttaaatttcagaaagctggtaagaaaatgaacacaaatgaaaccaaatataggtatatgcatgtgtttgtgtatgtgtatcagagtacccacataagtaaactcaggatgggtcgctgtgcttttaccagaaaaagaaaagaaagctgaacgattaaatcaatatacatgagacaaaaacgtgacaaggtagacacaaagattacaaggatactataggtgctaaatcacacttcttgatactgtattgaattctgctgacttcttataatttcagagttgctttatttaatttctggtcgtttttcagttaacagtgattactaataccaaagctctaactttctgtgatcttttcagttagttaaagaggggagtgtgggtagacataacagcattcagagggctgtcatttaaaaatgggcattctaggccgggcatggtggctcatgcctgtaatccaagcactttgggaggccaaggcgggtggatcacctgaggtcaggagtttgagaccagcctggccaacatggcgaaatcccgtctctactaaaaatacaaaaattagctgggcgtggtggcatgtgcctgtagtcccagctcctcaggaagctgaggcaggagagtggcttgaacccaggaggtggaagttagagtgagctgagatcgcaccactgcattccaacctgggtgacagagcaagactctgtctcaaataaacaaacaaacaaacaaacaaataaataaataaataaatgggtattctagattgttgttttgagatttgtttttagttataaatgcattctgaaatctcaagcctaaaagtttcccactcttttatggttaaataaagatgagaatcattttcctagtgacaggagaataagccaattgacttctaaaagtctctctgctctgtgacagcatattgcactgtatgtttcaatacactggaacatgcaatagaatgtactagaatgctcacgcctgtaatcctagcactttgggaggcagaggtgggcagatcacaaggtcaggagttcgagacccgcctggccaacatggtgaaaccccgtctctactaaaaatacaaaaattagccgggcatggtggcgtgtgcctgtaatcccagctactcgtgggggctgaggcaggagaattgcttgaacccaggaggcagaggtgggagtgagccgagattgcaccactgcactccagcctgggtgacagagcaagactctgtctcaaaaaaaaagaaagaaagaaaaacacagaatctatgtgtttcttcctataaaccaaagcttattatggatgagtgtcactgtcaatgttaatttaaaaagacatcagcaatacttttcaaacagaaaaggcacgttaaagagaacataacttcctaactatttaatgtattttgttcttgtcatcactagaatgttctcatatcaaatcaacattacattcacaccactatagtctcttttctacctccatcagcgtctcctccggcagttcaggggcttcaaaggtgatgagcccctctaggctggggggtgaagcaccgtaaggcacgtatctcaggctgggagctgcctctgctcctggaggggaagagccgaagcctgggccaggcggggaccccacgcacacgcggccactcatggcacaaagagagcccccggagttgctgggccccactacaaggaaacagaggatacatggcagtgtccagagttagggctttcacacccactcctactcttatttactaaacaaacctgctgaggtgacaaaggaaagtttcgttaaaagaaactcactgaccccctatgtactatttgaggatattaatagtttttacttatccatgttcattgttattccttgtctatatattttatattagacatcatcagagctagtttttttatactctgttttaaacaaatttagatcatattcatttctccttgctgctccacagggcctcataattataaaactcaatggatgcactgattcattaaatttatatatattatataatgtttatctggagtcatttatactatttctgattttattcatattacaaatagcactgtaatgaaatgcagacagttgttccttcttttgaataatttctttgtgataaatactctgaagtggtataagaaggaatggaattagcatagatcaataaatatttttacagctcttcctaagaactgttatagtactctctaacgcagccctgagtaagcacatagatcctactaaacctcaataacactggacatgatacttttttttttttttttttttttttttttttgagtcagggtcttgctgttgcgcaggctgaattgcagtggcgtgatcacagctcactgcagccttgattttctgggctcaggtaattctttcacctcagcctcacaagtagctgggactataggcgtatgccaccatgtctggctaatttctgtattttttttgtagagatggggtttcaccatgttgcccaggctggtctcaaactcctgacctcaagtgatcctcctgcctcggcctcccaaagtgctgggattacaggcatgaaccaccatgcccagtcttgggcattgtactttttaagatataggtatagttaacagatataaaatgttactttcgtaaaatggtattttcttattattcaaggtttttaatcgtcttaaaaacataattttagatctattttctcttatctatttctatcctttgcttattaacctggtctcttgatcagcaacttatttagaataagataacttgactcatgatacaacagataagacatcaaattattgatttcaagtccaatctaaatactttcttaagttttggtattaacctatttacagattataaatgataaatctattagccttctaactgtatataggattaagtgcaaagattgagacccaaagtacaaaaaattaaaaataaataaataaaacaagtttctttcttttctgaaacagagtttcgctcgttacccaggctggagtgcaatggcgcaatctcggctcactgcaacctccacttcccaggttcaagtgattctcctgcctcagcctcctgagtagctgggattacaggtacctgccaccacacctgcctaaatttttgtatttttagtaaagacaggttttcaccatgttggccacgctggtctcgagttcctggcctcaagtgatctgcctgcctcagcctcccaaagtaagtgctgggattacaggcataagccacctcacctagccaaaacaagtttctttaaaaaaaaaaaccaaaaaaaaaccaaacctataattttcaaataatttattggatctactaaagtaaccctttaatatataagctgagaagaaccatatacgatttgcttcttcacgaagaagtcatatttatactatatgtcattttgtaaaaacatatacaacatatatttatattttaatatataatatagcactttacaaagtttttttccccacaaatgatgcctcatttacttcttataacccattaagataaagaaaatagtaatctccatttcactggtaaagaaactgaagcccagagaattaagtgacttgtccaagttacaacactgagtcatttgtcaaaacactacattccaaatactagccaaagactgtaatataacaaatgctccttacctgaggttgttcttgttcgaaggaacatgtgggtacaagtgggggctgccgcactgtgtggaggagaccctacagtgaagaggacagccttggaacttgctgctgtacctgcaggaggtgccagaacaccaccacaggctcctgccggagctacaacaaaaagtttatagaaggtcatattaccctgatagtgtttatatctgggagatgggattgcagggggatactgacttttatatcaggagtctagtggttttttttttttccctcttcttacaaaaagtacttattgctcttaaaatcagaaaacgtaatacaatattttcattaaaataacttatagtaatctcaagtgtgaatcttcttcacaccaaaatttagcattcagagttatgtttgtatacttctaaaatacatgaactgtaagttatacatgttgaagacagtactaaaaaaatgaacgccaagaactgggaataaaaacaggttaaactagggtaggtgtggtggctcatgcctgtaatcccagcactttgggaggccaaggcgggtggatcacctgaggtcaggagttcgagaccagcctggccaacgtggtgaaaccctgtttctactaaaaatacaaaactttgccgggcatggtgatgcgtgcctgtaatcccagctactcaagagcctgagtcaggagaatctcttgaacccaggaggcagaggttgcagtgagctgagatcatgccactgcactccagcctgggtgacagagtgaggctccgtctcaaaaaaaaaaaaaaaagaaagaaaagaaatcaaaataaagacattcccaaataaacagaagctgagagaatttactgccagcagacctgtcttacaagaaatacaaaggatagctcttcagaccaaaagtaactaactccaaatagtaatcccaatctgtaaagataattacaaaacacaaactgtatatttcttctgttaactgattttaaaaagcaactgtataaaacatgtatacagttgcactgtcaggtctatagcatatagaaatgtaatgttcatttatttactttttttttttttggagacggaatctcactctgtcgccaggctggagtgcattggcacgatctcagctcactgcaacctctgcctcctgattctcctgcctcagcctctcgagtagctgggattacaggtgcgtgccaccacgcccagctaatttttgtatttttagtagagacagggtttcatcatgttggccaggatggtctcgatctcttgaccttgtgatccgcccgccttggcctctcaaactgctgggattacaggcgtgagccactgcgcccagccttagtttttatttttttagagacagggtctccacctgtcacccaggctgaagggcactggtgtgaccatagctcactgcagcctggaactcctgagctcaagtgatcctcctgcctcggccttccacagtgttgggattacaggcgtgagccactgcacccagccagaaatatatttgataataagaacataaaggagtcagatgggagtaaaactatattagagtaaggaagtgacaccagatggtaactcaaatccacaaaaacacaccaagataaccagaaatgataagtaagaaagttaatataacaaactataaatacatacttgctttcttatctcagcttcttttcaaagacataaaattacaaaccagagtaagatggcaaaatagaaggctccaccaattgtacaacccacctcccaaaaatttgcacacaataaagcaccttcataagaaccaaaaatcaggtgagtaatcacagtacctggttttaacttcatatcactgaaagaggcactgaagagggtaggaaaggcagtcttgaatcaccagcaccaccctccgcccctcccctggcagcagctgtgtgtggcaaggaaataatctgtgtacttgggggagggagagtgcagcaatttggggattgcacattgaactcagtgctgtcctgtcacagtgcaaaggaaaaccatgctgaactcagctggtgtccgcccacggagggagcatttggaccagctgtagctagagggaaagtgcctgtctgagtggccagaatgtgagtttctgcaagcctcaccaccacaagctaaagcgctccgggtccaagtgaacttgaaaggcagtctaggacacaaggactgcaattcctagccaaatcctggtgccgtgctgggcttaaagccagtggattggggcatgacttagagagacatcagacagggcttctaagggagtgtttgtgccactcctcctcccaaacccaggcagcgcagctcacagcaacaaaagtgactccttccttctgcttgaggacaagagataaaggtaaaaagggctttctcttatgtcttggatactaggctcagccacagtaggacgagccccgggcagagtcgtgagacccccatcccaggccctagttcctgttgacatttctaaacacaccctgagccagaagtgaactcactggccttgaaaaaaaagacccagtcctggcaggattcatcacctgctgactgaagagtcctcgggccctgaataaccaataatactacccagggagcatgcttgggccttgggtgagactctgagacatgctggcttcaggtagcagcttgattacagtgggatagagcaccaagcaggctcttggggttcccaagtctaggcctaggctcttggacatttctggacctgccctgaagggtgggtcttaggcctagcagcactcagcacatgctgactgaagagcccttgggccttaagttaacatcagtggtggcctggcagaactccttgtgggccattggtggttacagccacagggataggttcctctgcctgtggaaggggcaggaaagaccgggaaggactttgtcttgcggtttgagtggcagcttagctgcagtaggatacaataccaggtagatttctaaggttttttattccaacccctgactcctagatagcatctctggacatgcctggtgcctggggtacttgttgccctgaaaggaaggacacaaacctggctggtttcaccacctgctgattgtaagtcctggggcttgagcgaacataggtagtagccaagcaatgattaaagagggccttgggcaagacccagggctgtgctggcttcaggtctaacccaggcagttccagtggtggtggccacaggggtgtttgcatcaccccacccccacctccaagtagctcagcatagaaagagagacacgccattagttgttcaccttttgataaaaagttagggaagagaacaaaagtctctagctggtaatccatagaattcttctggatcttatccaagtcaatgagtctgcaagaactacagcattattgggcttggagcccaagtcccgtcaaatacctggaaagtctccccaagaaggacgggtacagattgcaaagcccaggctgtgaagacaacaataaatacctaacatgtcaatgcccagacacggacaaaaatctacatcaagaccagccaggaaaacatgaacttaccaagtgaactaaataaggcaccagggaccaatcatggagaaacagatacataacctttcagacagagaattcaaaatagctgttttgaggaaactcaaggaaattcaagataatatagagaagaaattcagaattctatcagataaatctaacacagactgaaataattaaaagaatcaagtaaaaattccagaggtgaaaaatgcaattgacacactgaagaatgcaatggagtctcttaatagcagaattgatcaagcagaagaaagaattagtgagctttgaaaataggctatctgaaaatacagaggaaacagaagaaaaaaatgaaaaagaatgaagcaagcctacaaatctaaaaaaagctgccaaaaaaaaaaaaaaacaaaaactaagggttattggccttaagtagaaaagactaaacaatgacccgatcaaaaataataactacaacttttcaagacatagacagtacaataacatataaagagaaacaacaaaaagttaagaagcaaggagatagagtatttttagttttcttattgcttgtttatgcaatcagtgttgtcatcactttaaaataatggatagggccgggagtggtggctcaagcctgtaatcctagcaatttgggaggccaagacaggtgaatcacctgaggacaggagttcgagactatcctggccaacatggtgaaacactgtctctactaaaaatacaaaaatttgccaggtgtggtggcaggcgcctgtaatcccagctacttgggaagctgaggcaggataatcgcttgaacccaggaagcagaggttacagtgagccaagatcgtgcccttgcactccagcctgggtgacaagagcgaaactccatctcaaaaataaaaaaattgaattaaattgaatcaatggatagtatttacaagcctcatggtaacctcaaataaaaaaacatacactggatacacaaaaaatagaaaccaagaaaatcagtgataccaccagagaaaatcaccttcactaaaagcaagaaagagggagggaagaaggaaggaaggaaaaagaagaccagaaaacaaataacaaaatggcaggattaagtccttacttaccaatacaaacattgaatataaatgaactaaactcttcagccatgagttaaaagacactgagtggctgaatggattaaaaaaataagccccacctatctggtgcctataagaaacacacttcacctatagagacacatgtagactgataataaagggatggaaaaagatactccacacaatggaaactaaaaaagagcaggagtagctatacttacatcagacaagatagatttcaagacaaaaaccataaaaagggacaaaggtcattatataatgacgaaggggtcaattcggcaagaggatatgacaactgtagatatatacgcaccctacacgagcatacagatatataaagcaaatattgttagagctaaagacagagatagaccccaatacaatagctggaaacttcaacgctccactttcacccttggatagatcatccagacagaaaatcaacaaagaaacatcagacttaatctgcactataggacctaactgatatttacagaacgtttcacccaatggctgcagaatatacattcctctcagcttatggatcattctcatatgttatgtcacaaaacaagtcataaaacattaaacaacaacaacaaccaggtgtagcggctcacacctgtagctgcagcacttcgggaggctgaggcgggcagatcacttgaggccaggagttcgagaccagcctagccaacatggcaaaaccctgtctctactaaaattacaaaaattaggtgggtgcagtggctcatgcctataatcccaggactctaggaggccgaggcaggcaaatcacatgtggccaggagttccagaccagcctggccaacatggtgaaaccccgtctctactaaaaatacaaaaattagctgggtatggtggcacacacctgtggttccagctactcaagaggctgaggcaggagaatcacttgaacccaggaggaggaggttgcagtgagccaagattgcactaatgtactccagcctgggcaacagagcgaaactctgtctaaaaagaagaaaaaaattataaaaattagccaggcatggtggtacacacctgtaatcccagcaacgagggaggctgaggcacaagaattgcttgaacctgggaggtggagattgcagtgcaccaagatcgtgccactgcactccagcaacaccctgtttacaaaaaaaaaaaaaaaaaaaaaaaatgaaataatatcaagcttcttctctgactaccatgaaataaaactagaaattaataagaggtattttggaaactatataaatacgtggaaattaaacaatatgctcctgaatgaccagtgggtcaatggagaaaggaaattgaaaaatttcttgaaacaaataataatggaaacacaacatactaaacctatgggattacagtgaaagcagtactaagagggaaatttatagctaaaagtgcctacacatcaaaaaagaagaaatcttcaaataatctaacaatgcatcttaaagaactacaaaagcaagagcaaacgaaacctaaaattactagaagaaaagaaataataaaaatcagggaacaaataaatgaaattgaaactaagaaaacaatacaaaagatcaaggaaatgaaagctagtttattgaaaagataaataaaattgacaaacctttgaccagactaagaaaagaggaaacaagacccaaaagccctcatgaatggattaatgccattataaaagggcttgaggtcaaaggacaagccctcttctgcccttctgccttccattatgtgatgatgcagcaagactgtcaccagatcaagtgccttgaacttggactttcagcctccagaatggtaagaaagtaaatttctgttcatcataaattacgcagtctcagatgttctgttatagcagcacaaaatggactaagacagatttcaatattcactaaggtgatctaataatgcaatctccaccaaaaacccggccagtctctcagagcttgcagtgagccaagatgatgccactgcactctagcctgggcgacagagcgagactccgtctcaaaaaaacacaaaaaaacaaacaaaaaaaaacccagccagtctctctacagaaactgacaagatgatgcaaaaattcatatggaaactcaaggcacccctaataaccaaaacagtcttgaaaaagaacaaaaaagaaaaactcgtatttcctgatttcaaaacttaagacaaagctacagtaatcaaggcagtatggtaccagcataaattgacatatagatcagtgaaatagttaagagtccagaaataaacatatttatagttgtattagttcattttcatactgctataaataactgcccgagactgggaaatttataaaggaaagaggtttaattgactcacagttaagaatggctgggaaggcctcaggaaacttacgattacagtggaaggcaaaggggaagcaaggcactttcttgacaaggcagcaggaaggagaaatgccaagcaaagcggggaagagccccttataaaaccatcatatctcgtgagaactcactatcatgagaacatcatgggggaaactgcccccatgattcaattacctccacctggctctcccctgacacatggaaattatgggaattacaattcaagatgagatttgggtggggacacaaaacctaaccctatcaatggtcaaccgagttttgacaaggctagcaaaacaacacaacagggaaagaatagtcttcaatggtgctgcgaccactgaatagcccatccaaaagaataaagctggatcccttcaccacatcatccatatgaattaagtcaaactggaccacagacataagcataagagctacatcttacacttttaaaattagaattataaaactcttggaagaaaatacagagttaggcaaggtccagatgcaatttaagaaggagtgtatagggaaacccaaagacaaccggagagacaaaaacaaggataccagagaaaattttagcctctgatacctacagctacagcaaacactaaataaagcttaactcctggccagataaacaaaaaacctcacactaaaggcctatttaactcagtttttaaacaaagtacatcatacccagcctcaattaaaaggcatgctaaaaggcaaaagtacagtttgaaaagagagagcaaatcaaacatcagaaccagactcacatatggcagagatactggaattgtttaataccacactgggaatttaaagtaatgataattaatatactaagggctctaatggaaaaagtggacaacatgcaagaacagataggtaatacagacagagagatggaaactcagagtcaaaaggaaatgctaaaaatcaaaatcacagtaacagaaacaaagaatgcctttgatggactcatcagtagactggactttgccaaggaaagaatcagtgagattgaagatatgtgaatatcttcctgaaacttcctgaactaaaaagcaaagagaaataagaatgaaagaagaagaagaagaaaaaaagaacagactaagaacaatggagccagtgcccagctagctcagtcagtagagcatgagacttttaagaacaatgagccaactataagagtagaacatatacttaacgggaataccagaagaatgagagagagaagcagaagaaacattcaaagcagtaatggctgaaaaacttccaaaattaatgacagaacaaaaccacggacctaggaaacagaaaacaccaagcagaatgaatatgaaaaaatctgcacctaagcatatcatattcaaacttcggagaatcaaagacagagaaaattttgaaagaagccaaggacaaaaacacacctcacctacagagaacaagggtaagaattacatcagacttctctttagaaactatgcagggaagaagatagtacagtgaaatattaaatcctacagtattctctttggattagaaagaaacgatgctggctcagatatttcctcctttggatgctcatggggaaaattaaaaagtcatagagaaaaaaaaaaaaaacaaggagattacaatagtgattctcaaatctgggtgtccacaataatcacctgggagtgtattacacatgttgattcctaaaaacccccagaacactttgggaggctgagatgggtggatcacgaggtcaggagatcgagaccatcctggctaacatggtgaaaccctgtctctactaaaaatacaaaaaaattagccaggcgtagtggcgggcgcctatagtcccaactacttgggaggctgaggcaggagaatggtgtgaacccgggaggcggagcttgcagtgagccaagattgcgccactgccctccaacctgggcgactgagcgagacttcatctcccaaaaaaaaaacccagaaaatttaagcaagcaagtctggaatacggaattacagtctagaatctccattttgtttttgttttttgacacacaggccaagtaatctagatatacatgggtggtcatgaacatacagtctctggagcaactccgaaaggttcaggggtctcagtgacctatgggtctttataaaatccagttgctgtaaagtaaatgctcaggagtacatgtaggtttaggccaacttcgaccagtattaccctactgataaaaaaaaaaaaaaaaaaaaaaaaaatcttcgtcagaactccttccattagtaacgcacaggctgctgctcatcaagatactgaataaggtcctattctgaatgggctactgagaaggaagatgagaggatagggatggcatccagaactatgaaataatacatttgtgttgttttatgccaccaagcatgtgatgatttgttacaacagcagtaagaaacaaatgcatatgctagcaaattacctgcctaaaaagaaactacatttttcttacctatatccattggtcgttctgtatttaaactgtctgtgctgccctgatgtcgacatataggagtctttccttgttgatctgataacttcccggtactgacagatctaaaaagaatagtgatgtttttaataaaggaaaagtatactttttaaaactagaagggttaataggaagttagagaatgaggaaacaagaaatagataccaaacaattcagggtagagataaacttcaataatacaaataaaggacagaaatagaatattcaaaaagttcaggaagaactatgtacttacatagttacaggaagcatctgtggttttcagagattctaaatgtacgtggtacatatcaataaccatatggcataaatcacccgctacactaatgtagtcttgctgcttttataacagaaatctatgttttactattacagttttcatgtttaatgctagaatggaaacagtcttttacctgccaaacactgccttgctctgctgctcggcccgctgcctctcacttccttgcactaagaggcaatgggcacattcccgtggctcattcccatctttcgactgttcttcagcaggcccatgacgagtaaccaaggctaacaggttggaagatgcttgagttttagggattttgaaaggagctgtggtctaaagagacatatatatatatatatatgtaaactagttaatacgatgcatgaactattcagtactggcaggtttgtgtgacccagtagtcaggagcatgtaggagataggtcgggtggtgggaaaaattgtagaaagatgcaaaccttcttggaaggccgggaggttttacaaaagttaggatttggctgaaggcaaccagattctcttatctggttcctgaaagcttaggttagataacaaggggatgtaaaaaaactgatctagataagttagtttacttaggccttggaacctggcctttaatcatccatgcacaattacttacaagtatgttgactcaaggcctttgtcattaaatctgtactaaataaatgcctgcagcaccagcatgtcagggctgtggctgctacaactctttctgtgaacggcccggtcccctagcccgctccttcactggatgtctgtgttggagtgcattttttcatccattacttggtcagggtctgcgggtgagacctggcaggagtatagactctggagtcagtcaaacccactggcagctctatttacagcttgtgtgaccttgcacaattaatttaaactctctaagcctcaatttccttttttcaggattaaatgggatcatacacaaaaagcattctgcaaataaagtacttacgctgcatctggtacacagaaagtgctcattatattatagctattattgtccaggagcagtggctcatacctgtaattctagcattttgggagactgaggcaggcagatcacttgaggccaggagttaaagaccagcctggccaacatggtgaaatcccatctctactaaaaatacaaaaaaaattagctgggcatggtggcacatgcctgtaatctcagctactcgggaggctgaggtaccagaattgtttgaacctgggaggtggaggttgtgatgagctgaggttgtgccactgcactccagcctgggcgacaaagcaagactctgtctcaaaaaataaaataaaaaaattatagctattctcataatgaatcctttccataaagtactataccagttcctgacctacaaaagggtttaataaacaaaccttagtaggagagccaatgattgttggcaaaggagttttaaagaaccagtcagaactccgtggagaggaccccaagtgcttggtgggagaagttccaaggctgccaggccgactgggctgaggcgagtagctgtacccagccccagtatgggatgggcacacggggtcagagtgctgttttctgagcttctgcttgttctgatagatgtcagtgagggtgggggcgctctgcagtctagcacccgataagagagactgtggggactgagcttgtggcactggagaacctaacaagaaaacaaatgtaacattaacctgaagtgaagaagtgcagtgcaaaaatgtaaaaattaagaagacaatttttaaaatgagaattctgataaatatcttatttttcataagacattctaaaagtgatttacttggcaagagactatttttctgtcatcctttgcaaaacaagtccattgttcgtattctcaggagacagaatttaatgattacaggttattagctgtttttaatcagtagatagcaaataactcagattaatgcaaggtctgactagcaccaaagagaacaatatcgttaatgattaaagttaatgaatacaacaaaaacctacattgaacaggatgattgttactctatatgaatacatacctggataaatctatgtaattattctcttttctcacacagcaactaaaagaaaactcgaactaactcaaaataactccttattcaaaaaaacaaaataaacaaatatatataacgtgtaggaaagaagatcataagataacagacctttctgagattttactttgtgtaaaaataacaagcatgtggattttctgtactttgtccattaaattacacacttaaaaccgaaagcatccatattctcacaaagataacacttgcctgcagatatccttgcctcttcaggggacaccaaatcaagagcctaagagatccctgtttcccccctacaaaccttgctgtttccaacccaaggtccactaatccttgactccagttacacactctttggagtttcttagaagccaaactagcaagaataatataaagggcgtgcaaatattcttagtgacctaaccatcattcttctaaaaacagaaaccaacagaagctttgctattgaccacttctggcttcatctctttccaaacctgatatttaattttactgccctttataaaaataaatttgtgttaaaatcttatggtctgaataaagttatttaagctttgttaaagagtgcttttctaagtaacacaggattcctttaactggccaactccttaaatatccatacaacagaatttaacttataaagtgtctttaacttataaagacatgattcacacatatcttttcaggcaaatacatataatttttaaaatctatattattttatctgatgctgactcatggctcttaccaaaaatggtattaatcagccgggcatggtggctcacacctgtaatcccagcactttgggaggccgaggcgggtgtatcacagggtcaggagttcgagactagcctggccaatatggtgaaaccccgtctctactaaaaatacaaaaattagccgggcatggtgttgctcacctgtagtcccagctacttgggtggctgaggcagaagaattgcttgagcccaggaggtggaggttgcagtgagccaagatcatgccactacactccagcctgggcaacagagcgagactccatttcaaaaaaaaaaaaaaaaagtattattaatcaatagtattaaagtaataaaatttcactccataaataaatttcattatctatgtgaaaataaccaaaacttagccaagttatttaatttctaagacttattttcattaaggaatctcatatccaaaaggaggtagtagattagctttatgacatattaaaccacattagaccaagattctaaaaatcaggatggcagaggagatatttcatatcaattctgttctttgataaaactagaaaaacacaactcaaatccatttataatacaattcaaattattaataaaccaaatacattatcctacctgaggagtttctactcctggagtcatggccctgaggatgcccacagcagcactgactgaattgctcaggaatggtaccaactacaaaaaaaaaaaaaaaaaagatggggaaaggaagaaaaatgatcaaaaaccaataaaagatggcaacaggcaacacatgcacaaattgcacagtaaactactggttagaaaattttaagtaacaaacgtttagttcaactaacatttactggacaaccaatccgctgggtgctgcacactaagataaaaagtatcatataatctgccttgaaataagaacattaggggaagaaaaaccacataaacaaataaatgctcctaacaggtatgtccataagacaggtaagcacaaagagtttgtacaaagtgtccgggcttgtggagctgcagggcacagctaacagagagccccagctgcagtccctctggtgccaaggctaggcttcccccagggctgttcccagccaatgactgcatatggtgggacactaattcaggcttgttgaagcgggtcagggaattcctctaacaagacaatccagtgcttggggctacttcttcagtctggctgaaaccttctcagacctacaccacagtctgagactcttcctggccagctcttcctccttcctgccctccttttccaggtgttggacctatgtcttggtctgagggccctccctgcttcctcctgctcctccccttcattcttcacagaagtttccccaagtcactctcttgtatatctaatatgttctatgcatccatttctctgagaattaaaactaacacagagagagagagttagggaaggcttcaggcagtttaagcagatgagaaacatgtctatatcaagagggctcattccaagggattaagcagcgggcagagatcagatccttagggaagggctttatccttgtgtgcaaggatgagatttggaccttatctttggagaccttgaagtacctcaggggctgctacaggggtgagaaagggccaaaattttatttaaagatttttcatctaaaaacagctttgaaaccattgcaacaggtaatgtggcaatttaaacttctttctttttcttaacactgtcattgtgtgttttgtcttgttttaaacagggctcctgaggaaagcccttctctttgtctctggagacttcttcctgttccatcttagtgttacttcagcagttctgactgaaggtggggccctctcctggaagtattttttttacagttttgagatttgccacccccaggccctgcgtgcaccacctgttcttcccaccacctcagtgctgcctctcatacagctgctgtagtctcaatggctttggctctctcacacatatttctgcagtttgagcttttatttctgtcccttggtttcactgaagatatggtacatggtttgtttttccttttggtagggtttttgttgtttctggtgttttgtttgtattggcattctccttattacggtaccaggagaagtgggaagatctgtaacaaagctgccaccacatgcctaccagaactggaaggtttctggtaattgtgacccagagctgctatacagtaatccttataagtatgagtgataagtagaaaaggcattttatgcacttcaacctagggtttctgactttgcatttagagcccaatcccaaaggagatgctttttatacataaattacatttatattattgtatttccagtagagatcctaacaaatttatacagagattctcaaaaagaagttggggccgggcgcggtggctcacacctataatcccagcactttggaaggccaaggcgagtggatgcttgagcccaggtgctcgagaccagcctgggtaacatagtgaaactttgtctccgtaaaaataaaaaagtaaaaaaaattagctgggtgtggtggcatgcgcctgtagttccagctacttgggagactgaggtgaaaagatcctttgaacctgggaagcagaggctgcagtgagccgagatcatgccccctgcactccagcctgggcgacagagtgagaccttgtctcaaatagagaaagaaaaggaaaaagaaaagaaaagagggagttgggattggggtaaagatggagggacggggtatggcctccaatcagctgagaatcactgccatcatgagccgaagttcctaaagaaaatgtgtcatgtcagatttattacagtgaaaaaaaggttgaaaacaactgtttttaaactctacttacccaaaggggaaggtgagtaaggcctagaagacccagtggagagccttcgtccaactgtctgtgctgtgtctgctggtactggggagcatgatcccggccggaggaagcccatggggctggtgttggaccttcgtaccactgcagatctgaaaagtaaattattccttctataaaaggttctagaactctctttttattcctgcattttctgaaacttcctaacaatatgccacggagtagttttcaaaaatatgtaatacagtcacatggaacaattataagatgcataaaaagagtgaggtctccctctcatttttctattctatctgcctaattcccaacacttccccaattctgttcaaaaggttaccatgattcttagtttctagtatatccttccagagttccttaatgcatatacaaaataaactaaatatatactccttttcaccatgttttaacaccaaaggtgatatattacatatcaatcattttgaatccttttggtcttaggtcctgtttatactcttaaaaattactgaagaccccagagagttctgtttatgtaatttatatctattgatatttactgtattcaaaattaagctgagaatttttaagaattattaactcattaataagcttattccatgtaatataagattatgaaaaataagcatattttccaaaacaaaataaattagtaagaagcatggcattattttatatatttttataaatttctaatggctcacagaagacatttggattctcataattgcttctgcattcaatctgttgtaagatacgttattttgagtgaagaatatgaagaggatccagccttccacagatgtgtaactgtgaaaggaaggaatattttggtagccttttcaggttaactgtgacacgtttctttgatactacaccaaaactcagcaagtggtcgttgctaaaaggttggctgcaatgtggatctgaaaccagattaatgaactcatactccattatgtgagactccattcttttgcaaagaatcttgcactttgaatgaaatttttacctgtgcatgattttttttaaccattcagtaatctggaaaacattggttcactgagttatgcagatattccaatgctgatacattaaacaatatcaaaaagtcatattcataacaaaatatcaccctcaattttaaaagaaacacctgtcaaggtataacagaagctgtcaaacttgtattcaccactgaatttttccaacattccaatttttgcttaaaagctcaagttttatcatcacttgttttcttcaaagtggaaagacttaccatttttgacaaaatagctgcttgatacccataaccatagtttatcagccattttttaaggtaaaaagggtattctatgacaaagcagctagctcaacttggaactagaacaatcatacaatgcttttcctaagataactactctaatatgtggcaaaagtgctttatgtgtacatctcactcaaagattttttcaaagaaaaatattaatttttactgcctcattaaggacattcttttgtactgcaagtgtgtagtggagaagaatacaaagactaatagtactgtttgggtaccaccaccctgattcaggcaaaggtaccaatagctttatccatctttgcattttgtactatcagtgcatgtatcaatgtaatgaaaaaagcaaataacgtctaatttttattatgaaaatagttttgacctcatggaccctctgaagggatccacagactaaactttgagaaccactgtacaatatactgttaatcactttacttttttcattttataatataacttggaaatctttctatcttggcacagagggaactccttcactctttgtggaatggaaggtgtgtaatattccattatcagagatggatcctaataaattagttcattaccagtggccacttggcttatttttcatcctttggtatcgtaacagttaacaactttgtgtaaatgcaatttcatacacaggagaggcctgtatatgtagactatgtccatgacatacatatatgtagaattagttaccagaagtcaaagtgctatttcctccctccactctattgggtgctctgagatttaggtctctctgagggtactgtggggcacagtgattctccttatgtcagaatccctgattacgtgcatacttatgtctgccatgctaaatcaagtaccattcttctatccccttctgttttccagaaatttactgaactctctctctcactgaatagagtaagaataacctatgcttggccaggcgtggtggctcatgcctgtaatcccagcactttgagaggctgagacgggaggatcgcttgaggccaggagttcaagaccagcctggtcaatgtagtgagaccccgtctctaaaagcacaaaagaaaaagaaaaaaaaaaagaataatctattcttatttcacttgtttttgtggacttgtacctttgttattcctttaatatgatcttagtaaggtctcaggatgggggaaaaagtaaacaatatgtaaataatctgctacaactggtgggatttcattttttaataagttcttcctcaattcttaaaagtaattatacattttaagtatatatgtctatacacatgtatacttaacatatataaaatatatacaaatatatacatatcatactatattatcaagctaagcttaaatagcatttaaattcatcaattataaaactttattattcaattttgtgcgttcccattatacacacatgtaagacactatgccacagaaagtaacatatcttccaatatcaataaattttttttaaaggagatgaaaaagaattaagcaagaaaaaagctactaacttaccttggagaaccatgtacatttgtgcctgagctggcagtagatgtaagattctgctctatgcgctgataattccttatttgagtaggaactggaattggtgctgtttcgctgtgaggtgacacagtaggctgacactgcctgcaatcgtaatttattgaaaaaggaaagaaacagtggtaggattgtttttctttcatttgacccattagttatatttagagaaaattccagaaagagccaaatggtcactccactaccttaataagaaatgatcttgttaaaaaatatataaagccaaaaaaaatcacatttattatctaaaaaactcctggcattcatatgcatattgaggactaagaattataataacctggaaaaaagttcctttacaacaacaggaaaagtccacaggtcagcaaaactgtttcatccactcacattctgctattcattactatgtgagagaaaaaatatccaggaaaatatgctgggtaaaagaacgggaagttcaacaacaaagatgactggaatgtttgcaaaagtcatgaatgctgtaagcattctcaaagagctctgactttatgaagaaggagaacatcttgcacaaactctcaaagcatgcaactcatctgacgtccacattttgtagtgtcagtatttggtttctttaatagcctctttcctcacttttcataaattcagaaatagaatgtccttataccactttcaattcactttacaacatatcctaaaaacatatcagagataacactgggccctaagagagatgacttatttcaaagtaaaaagaaatacaaaacacttttgtagtggagatgttagctgctttcccaatatccattcagcctttatgtcttactaaaaaataacttaaattttattagtggcaataatatgcccaattaattgcagcatatcccagactcccttgcagccaagcataaccatatgtctttcttggtcagtgagatataagcagaagtcttctactcattcttcctgttcaaaatgtgagcatgcttgctggagcttcagcagatacctttgaaccacaaaaaaaaaggccaaaagacctgaagacacgtaacttccttgagccacagaaactaaggaaacaactgtttatcgtgacttttctgcatgagagaaaacctttaagtgttcaaccactctatagttaggaccctgtggtttacagccaagtggaattcctaatgatacgccatttagtgtgcttctatgagctctctctatacatttttatttaggtatttccatttagtatctttaaatacaataatgtttttaatatctacacatctgattcttcagtttatctacatcctaaaaacaaacaaacaaaatcccaaaaacacaaaccctctactaccactaaaacagcttaacagtacttcactaatcagctctggtgtctgcaagccagtgcactcataggtctgacaacccaagttccttaacaacagaataaccaacacagtcatcaattatcagaatgtgaaagaataaatgccatttttttattgtttcaatttagtaagtaaacagagtttttgaagcattcattccctgctaaagtacatcagggaattttttttaaatacacattatcaagctctaaaatttttcctgtactggttaatctccaaagggaagaagctaaataaaggtacccaaagaagtaaacttagcaacctcataattctaagcacctctctcaggtaatctcagctggcttctctaacacctctggttcctccccctaccagcatgaggacatgaacagccatggatggtgttctgcaaatgttatctcagatagtctctggacaggacctgcaagcagacttgctcagggtctagaaagtcttccctggacaaattccagatctctagctagctaagacaactgcagccattttcctgtacaacttaatattaacaccaatatttaaccatcttcaactccctgagtccaagttaaggagagggaaagtctgtgtatgtcctgagtctccagcacatcttcctcacctccactagggcctacaattcacaacattctctgtgtggaccgtcatcttggacccatatgaaatacttgaaagataaggcagcctggccacacaaaagcacaatcacatgttattctatctacttgtgctgagaggaaagcacaaatgcaaatggacaaataaagactaggtgatagcatgacaacttcttcaaatacacaatctttacaccaggaaatccccagttgcctctttgttttagaagactccatgagtaaatcctgaaagggtgacaggtaatcaggaaagcaagggttcagctggaagtaatgccaagggacagagggagagaagaaggaaggatctatgcataagagctcctgtgaaactcaatctagcagactaatgctaagccacagttgtgagctcatgctcatgaggctgtgtaagtgatggggagccaagtggagataacctgctcatcacccagagacccaagcagcatcagaaaagggcctagtgtggcacacaggcacacagcttgcaaggttctagtgagaaaggggttactgcatgtaaagggaagcaatcagaagggtagaaatccactcagatggtgcactctaatgcaccatgggctgtgtatgcagctggcctccatcaatgtctggcaacaaccagtcttagaattctgatatcctaactcccatgcctatgcctattttttgtctggatgcacaaggaatagatattatattccctacatgtactgaaaactgccatgtagctattgaaggcactattactaagaagtgctgctttagagaaaaatgcatattcactggtaaaggaaagttcaagaattagaccataggaagagaagccaaaaaggagccaaagatgactcaagaagaaaaaaaggcagcacatcaaaagaagtgaaaatctggcaatatacaattcccataattgaattcccatatcctcaaagagaggaaagaaacaagattgtacaagatttgcttatccccgtggttcccaaactgtgcactgagggcccccaaggtaccagtgctactcaaggggcgccttagagtacatcaaattgtttaaggtttgggaggctgaagcaggtggatcacgaggtcaggagttcaagaccagcctgaccaacatggcgaaaccccgtctctactaaaaatacaaaaaattagccaggcgtggtggcgggtacctgtaatcccagctaccctggaggctgaggcaggagaattgcttgaacctgggaggcggaggctgcagcaagccgaaatcgcaccattgcactccagcctgggcaacaagagcgaaactccatctcaaaaataaaagatactcttgcatatacagtgaaatgatctcagacaagaatgctaagaccacacaatgggacagggacagtctcttcagcaaatggtgctgggaaaattggatatccacatgcaaaagagtaaagttggaatcttatcatacaccatacacaaaaattaactcaaaggggattaaaggcctgaacattatacccaaaactataaaactcctagacaaaaacatagagggaaagcttaatatgacataagagtaggcaatgatttcttgaatatgatgccaaaagcacaggcaacaaaacaaaaaatacacaaatatgacctcctcaaacttaaaaaatgttcatgtatcaaaggacacaaagagtcaaaagacaaccaagagaatgggaagaaatatttgcaaatcatacctgacaagaggctaatatccaaaatatacagagaactcttacaacccaacaacaaaaacccaaataactcaatttaaaaatgggcaaagatcttgactggacatttctccaaagatgatatacaaatggctaagaagtataagaaaagatgttcaatatcactaatcattagagaagtgcaaatcaaaatcacaatgaggtatcacctcacactcattaattaggatggctgttattttagaaaataacaaatgctggtgagaatgtggagaaactggaacccctgtgcactgttggttggactgtaaaatggtataactgctatggaaaatttagccaattcctgaaaaaagtaaacacaaaattaccatatgatccagcaatctcacttcttggtacatatccaaaggtactgaaagcaggatcttaaggagatatttacacactcatgtttataacagcatgcacaatagccaagaggttgaagcaaccccaaatgttcaccaatggattaatggataaacaaaatgtagcatatacataccatggaatataattcagctgtaaaaagggaaaaagcctgtcacataccacaacatggatgaaccttacagtcattatgctaagtgaaataagtcaagtcacaaaacagataaatgctatatgatttcacttacatgaggtatctaaagtagtcaaattcatagaaacagagagcagaatgtggttactatcagggccttgaggggaaggggaaacggggaggtaatatttaatgagtataaagtttcagatttgcaaaatgaaaaagtcctagaaattggttgcataacaatgtgaacatatttaacaataatgaactataaacattaaaatggctgaaatagtagattttatgtgttttttatcacaattaaaatttcaggctgggcacagcggctcacaactgtaatcccagcactttgggaggccgaggcgggcaatcacctgaggtcaggagtttgagaccagcctggccaacatggtgaaaccccatctctactaaagatacaaaaaattagctgggcatggtggtgcgtacctgtaatcccatctactcaggaggctgaggcaggagaatcacttgaacccggcaggtagaagttgcagtgagccgacatcacgccattgcactccaacctgggtgacaggacgagactccgtctcaaaaaaaaaaaaaaaaaaaaaaattagccaggtatggtggcacatgcctgtaatcccagctacttggaaggctgagacaggagaatggcttgaacccaggaggcggtggttgcagtgagccaacatcccaccaatgcactccagcctgggccacagagcaagactccatctcaaagaaaaaaataactaaataaaatttcaagaaaagaaataatgaggcagggtgcggtggctcacgcctataatcccagcactctgggaggccaaggcgggcggatcatgagatcaggagatcgagaccatcccggctaacccagtgaaaccttgtctctattaaaaatacaaaaaattagccaggcatggtggccggcacctatagtcccagctactcgggaggctgaggcaggagaatggcgtgaacccagaggcagagcttgcagtgagctgagatcacaccattgcaatctagtctgggtgacagagccagactccatctcaaaaaaaaaaaaaaaaaaaaaaaaaaaaccagaaataatggactgtaaaacaaaataaatcttaaatcaagaacactaagttctataaccttactcacaaaaataaaatataaaacaaattttaataagataatgtaaatatacataccctccacacaccaagaattcatttgaagcacgtctgccagcagtccccactggcatatcacctaaaggagagaaaagaacaatcagttcctgttataccatctgcttaaaaaaacacaaatttgttccaaaatgattattaggatttcatgcacgatgcaaaattaccattggcttatgttatgatttcatgtataagaaataatagatgacctcagaaaactacacctagctgaagacataggctgcaactctttggatgcccacttctataagcaaatttgaggtcttcttcaaaataaaatgccatatttattgcagtgtttacatatttcttccccattaaacatgcaaaaactgtgctgtttttatcaggttcctttttctgtgtcaatgacaaaagttctgagagttgtgccctttaatactatttgcacataactttattgcaaaattttgcaaagaacatgtatataacataatagaagaactgaccatataacaaactctagttccgtaaaatgtcggattaccccatcctcctgcataacactctctcaggtcttgcatgagttgttgaacaagatgtcatggaaggccaggtgtggtagctcatgcctggaatcccatcatttagggaggcagaggcgggagaatagcttgagcccaggagtttgagacctgcctgggcaacatagcaagatcccattctcaaaaaaaaaacataataatgtcaggtagcaataagcattataaaggaaaataaatcagggtaagggaaaaaagagtagcagggcaaaggggaagtccatttttatttaaagacaatgaatatttgtctataggagaattgagaaaacagggagaagaggcagggataaaatctagattttactaagtgtacttcctttcgtagctttgagtttgaaaccatacataattttcaaacgaaattaaatcaaaagaaaataaaatccctaaaaatcaaaagtaaaggaacctaatcatgtatcaacctgatagcttaatcacgagagggaaattatttcaagtaacttttttttttttaatttatgtatttttgagacagagtctcactctgtcgcccaggctgaagtgcagcagcatgatctcggctcactgcaacctctgcctctaaggttcaagcaattctcctgcctcagcctcccaagtagctgggattacaggtgtgtgccaccacacccagctaatttttgtatttttagtagagacagggtttccccatgttggccaggctggtctcgaactcctgacctcaagtgatctgcccacctcggcctcccaaagtgctgagattacagacatgagccactgaacctggcctcaagttaactttgaaactcaataatttgattgcatatacccaatgggattatcctaaggacaaaaaagatcttaaatggctttcaatgaccacattttaaaaaattttaagtcagataggaccaataaataatcatattttaagtaatattcatagagttcttttgataccatgttgtaattttgaaactatagaggcaacgggacagaaaagagaagagcctaaactcacaaggacaaaaagaacagaaaagttcacagccaccaaaatttggaaggtataaagttgatggacgagtagtatttgacttagttgacccaagaagatagaaccttagccagctggaaagcccagaagtaaaccaatttacatcacagaactccaaaatgcttagtaatcagcagtaccacatacctttcagagtagcactgaaggtaggactaaaagcaggattgattgaaagtctatttagaagccgttagaatacagttcatcatagtgtatcgtattcaggatttttggtaagtgaatagattacagctgctcatggagggaggggtgagtaactgtgagttgatgaatacattaatttatttcaccgtagtaaccattttactatatatagatgcccctcaacctaagatggtgtcacttctgaataaacccattgtaggctgaaattgtcctgggtcaaaatgcttttaatacacctaacctaccgaatatcatggctaagcccagctaccttaaacatactcagaatacttacactggcctacaattgggcacacaaagcctattttatgaagtgttgaatatctccagcatcagctgtttactctggtgatcgcaggctgactaggagctgcagctcgctgctgccacccagcatcacaagagagttctgtactgcatattgctaatacagaaaaagatcaaaattcaaaatttgagggatggtttctactgaatgcatatcattctcccaccatcataaagtcaaaaaattgtaagccagtgactatttgtatatctcataatatcatgctgcataccttaaatatacataatacaacgtatttttttatatagaattctttttaaaagaagcagttagaattttatatcctttccccaaccttatgcaggtaggcaatgcccatctcccactatagcaaaaaactgtacattcatacttgggacagagtaaaacagagggtctctgaactgcagaacagcaggaaaaattaaaagcaagggtactacactgataaaaagattagtggaaaagagttattaaacgaaattttacactgactattgagaactccatacttcttcccccattttgctactccagataatatcaggtttatactcttcaggcaaaagattggatgagtcttttgggggatctgagtagccctccaaaagggaaatagtcccaagaattgcccccgccatatcattcatcaaagaggcttgcttgctgtcaatgagacactcccacatacagagctctcaaacaactttcaaattctccatcatcaagaagcatacaatatactgcatgttgaaataagaacaatactcagagaaaaagaacttctgaaaatttaaaacatgagagcataaaagaaaaactcactaaaagggtaagaagaaacattaataaattagagcaataagacaaaaagatggaaaatatgaccaaaaaaagataaaaatcagcagggcactcaggtacttgttatgttatatattacttttaaactgtataactgttttaaacatcttgtatgtatgatacatttcacaatagcacatttttaatcattaaaaagaagggcatgatcaactgtaacaaatgtggatatatcaggacaatgaggactgagaactgacccctaggatttggcagcacaaagatcttgacaggagcagttttgaaacatttacaccagcacacacaagaaaaaagataactagaagaaaacaaaagatgtgaatgctctttatatagaaaagtataaaaatgtatcaaaacacattaaagaaacctaaataagtggagaaatacacattcataattaggtgacttaatattgtaaagaacctgcctgtccttgaataggtcatactatacagtcaatgcaattcccatcaaaatcccaaaatggttttcataaacttattgagctgaaattaaactatatgtggggggaaagggccaagaatagccagagtgattctgaagaatactgaaatgctctctgcctctccttccctccctgaccacacacacatactgacacaaatttaaaaattcttataatatagacaaaaaaagaaaccccatcttgtatttcaagctgacatgacaaatgtgacactgcgtatcagtggagaaaagacaaatatttaataaataggacatgtgactgatttctaccttgctccatctacaaaaatgagttacaggtaaaattaaatgtggaaaaaaaaatctttagaagaaaatatagaacaccattataacactagggcagcatgacagagaatattagtacaagttgtttgtaccaatatattataaagttgtagatatctaagtttttagttagaagaaattctgggacatgtacacaagaatgtctgttattatatacatatatatatatatatatatatatatatttttttttttttttttttttttttggagacagggtcttgctctgttgcccaggctggagtgcagtggcacaatcatggctcactgcagcctcaaactcccaagctgagactacaggtatgcaccaccatacccagctactttttctatttttggtaaaggtggggtcttgccatgatgccctggctggtcttgaacttgggggttcatgcgatcctcccacttcagcccccagagaagctctgactacaggtgtgcaccaccacgtctggctaaccttttagtttctgtagagaaagaatctcactatgttgcccagactggtttcaaatttctgggtacaagcaatccttcctcctcagcctcccaaactactgggattacaggttgtgaaccacaatgcctggctcattacattttggacagtgaaaaggtagaagtaacccaactataaatcagtagggaaatggataaactgtgttttagttatattatacaattcaggtattggaatgaattttgaattttagaacattcacattatactgagcattccaaatgcaaaaatctaaaatctgaaatgcttcagtgagcatttccattgggcatcatgctggcactctaaaagtttcagatttgggggcatttcagattttctaatttggcaggctcaacctgtaactataaaaacacaaaaaccctgtgttaagtatggatacaattgtatgcagaaatatgaaatctacaggaagaatatacccctagcaagagcagaaagagaaaaggcactttagctgtacttaacagcatttttttttgtttgtttttttgtttgttttttgagacagagtcactctctgtcacccaggctggagtacaatggcacgatctcagctcactgcaacctccccctcccagggaccccagtgctcctggagggggttcaacgattctccagcctcagcctcccgagtagctgggattacaggtgcgcgccaccatacctggctaatttttgtatttttagtagagacggggtttcaccatgttggtcaggctggtctcaaactcctgacctcatgatctgcccacctcggcctcccaaagtggtgggattacaggcgtaagccactgcgcccagcaacttatggcattatatatattttaaaaacacatctaagacaaatatggcaaaatattgacctatataaaagtaacacagcctagtgggtaccttgagtatctgctctactattttgtttaaaatgtttcatgattttaaaagttttaattacttttggtaaataaataaaaccacttgactagttaatgggtgcagcacaccaacatggcacatgtatacatttgtaacaaacctgcacgttgtgcacatgtaccctaaaacctaaaataataacaaaatttaaaaaaaagaaaaaagaaaaaaaagaaaaccactgtactagattacttttaaaggtaactctcagttctcataatgctggttataaactgccatggcactgctgctgtggtccatgttttcccttccacacccagctaatacttaattacattcagtttagggattatggtcttcacaactagcacagtgcctagaatgagcatctactaaataagcactagacgaacaactaaaaagacctgatacaaactgctgcacataatcagcacttgatattattcaattattaaagtaatcaaatctctagcttttctgatactattccttcatgatcaaaccatggctccttctttttaatagttttacctaatatctcttttttgtaggttttctggtacccttcactattccaaagtacactggctctatttagtcacttggcttctagttcctttatgaaaattcttcccatatatttatgaagttcattccttaacttacataagtattttctgaaggacgttcagattgtttataacactcttttgactcaggttttttccccaaatgagttgttcctttctttccttagtttcactcattctgctggtttctctatttctttctgtttggatacaaacagaatttgagatcatttcctataaagttttcatgtaccttcagaatccaaaattattgtttaatagaagatgattgagcaaattttaaaaaggtaggaatataattctgagaattcaaacaactaaataaaatgctcatttgaaaaggtgccctacacaagaaagtgtaatatatgggttaaaaaaaagatgctagtttagtagattaagaaatacaatgtgtacaagtagaaaagattctcacatgagtggtctgacgagatgttgtgtggcaccaaaacaaagtcatccgtgtcacaagaagagttcttgctactagtactggcagaatctttggaaacttgtagatagttgggaggacccaatggtggggaagataagttttcttcctgaatatgctgcatatctggaagggactaaaattaacaacataaaattaaaactggtctaataatcaaatgcaagtcagaatagtgactagactaaggaatttttttttttcccccacaaaagtgggcatgaagtccaattccatctaaggtttcaaaaaaatctctttggaaaagctttcctttagaaaacctttcttttaaaagtgtttgcataaagacttctgaaatgttttccaaaaatgatacttaaaaatatatcgtaccacttatccgcatgtacttgcctccctctcctgaagtttttgagaaagtaaatttttatcatcacaacatcccccggttctagctcatggcctaacaaagcagatacttaataactttccacttaatgactaaacacaaaatgtccagagactttaaattaacgacatcttacacacacacgttttaaatatataatgaagaaaaattataagcaggaaaccaagagaccacattatgtaaaaaaatagacaaatcaggaagggtgcctgcacttaagaccagaaatgtatttatagatttggaaaaccttacaggtatccttgtgttcctcttgtttttgttttatcaggggtagtagttgatttgttagtaggagataggataggaagggaagaaaagcatgtaaatatatttaaacaaatacttaagagctaactagctacgtatcttttgtcgtttatctagtgcaaggaccctagttgacaactcattgaatatcttgattatacaatggttttctacaacaatgaacttcatagcttattgtgtcaagcccctattaacctgtttcatctttgcctttatttaaggaacggaaaaatactatattatgctctttaaacccaagccttaaatacctggttcactgctgctgctcctttgaatgtcactgtgccatggtatcggtcactgataccacttattttcatgtgtgtgacatgcacttgacacaatctctccttatcactttttgaagagactttgtatctcaaggtaatgaagggaagggaagatggaagaactagcactactgagcctcaaccatgcgctaggcactgttaaaagagctttccggcagggtgtgaatcacggctcacacctgtaattccagcactttgggcctgtaattccagcactttgggaggccgaggcgggcagatcacgaggtcaggagatcgagaccatcctggctaacatggtgaaaccccgtctctactaaaaaatacaaaaaattagccgggcatgacggcgggcgcctgtagtcccagctactcggggggttgaggcaggagaatggtgtaaacccggtaggcggagcttgcagtgagccaagactgcgccactgcactccagcctgggcgacagagtgagactccgtctcaaaaaaaaaaaaaaaaagagctttccatgttatctaactttagcccattcacatataaataaagttcagacaggtaatttgccctagatcacacaattaaaaagtagtcaagctgagatgtgattctaactccacaatatctttccagtggtttaggcaggaactttcccagtttcttctcctgctatttacaaaattacctgcatctacaatcaccctggtcattctttctcgtaacagtggaagagatgcttctcttccatgggcgctcctctctccacctgtgctctgcattccatgctcctctatgtccccagtggcctagaacaactcccctcggctcctgacattttcatcctctccttttgttatggcattttttccctctgtagataaccatgtttaactttctcacatctcaaatccctaaaaccctctcaaattatcatctcttcttcatttcttttcttttttctttttttttttttttttttttgagatggagtctcactgtgtcacccaggctggagtacagtggcatgatcttggctcactgcaacctctgccacccaggttcaagcgattctcctgcctcagcctctcgagtagctgggattgcaggcatctgccaccatgcctggctaatttttgtagttttagtagagacggggtttcaccatcttggccaggctggccttgaactcctgacctcatgatccacccgcctcagcctcccaaagtgctgggattacaggcatgagcctataaacaacatatcttgaaattatcatcttcactgactcaaatgtgtcacatcctatatatcccttaattcaacataacccactctgtcttcaacccttgaataaaaatgcctttactaagattatcaataatttctattgtcaagtccagcaagtatttcccgtactccttaaggtacttgaactttttgctccatctgtactgtggaccattcttctcaacactctgccccttcattcagtgaccctgcaatctcttgtttttcctacttcttggggactccttctgagtctcttttgtgagtacatacttctcatttgcccctcaaaaaggaggagaaggagaagagtagagagttccccatgagccaccctgggctcttcacgcttcacttgttgtacttacccgagtgaccatgctcactgtccctcctacctttaactaccactcacagaatgatggttcctactttttgatcttcagccaaaattctctctgatgagctctagatccctttgttcacttgcctatacaacacattcatgcctgtacgttaactcatcacctttatattccaaagcactgctccccaagttccctcagagtgaccttgccagccggccattgtcaccagcaaggtctcactcttcctcaggttccaagttcaagcaatcttcaagatctgtgcgctctttgcctttctcttacctggctcttctccttccttactgccgccttagttcaggcttcgttctcaaaacagtaatgacgacaacaacaatgatgataaaataaaaggtgcaagggtctcaaggtgtcctctctcctctagtggagacctctgtatttcctctctcactccaacctagtcctccaccctgcttttgggagaatctagctaaaaaacacagtggatcatatcactcactctaaaatcattccaatggctcactgcaactttatttattttttttttttttgagatggagtctcgctctatcaccaggctggagtgcagtggcgtgatctcggctcactgcaacctccgcctcccgggttcaagcgattctcctgctgcagcctcccgagtagctggaactacaggcgcgccccaccacgcccagctaatttttgtatttttagtagaaatagggtttcaccatgttggccaggatggtctcagtctcttgaccttgtgatccacccgcctaggcctcccaaagtgctgggattacaggcgtgagccaccgtgtccggcctagctcactacaacttttaagaatgcagctgaaattcctttgcttgacctccaaatactgtcaggcctctgtctacctctctagctttcttttcccttcacccatcaccaatgctctctgcatccaccaaactgaactactgagtgcagccttgttctttctgcaatgatggaaaaggcctatatttgagctatccactatgggagctaccagctagctaaggctactaagcacttgaaatgtggctggtgtgaataagaaaatgaattttaaaattcacttaattttaacaaatttaaatgtaaatggccatggagagctagagttccttcagtggctcacgcttctatgacttcatgtacggaaattcttctgcttacaatatcattctttcactaattcttgcaatctttcttcaaaactcagctcaaacaatcccctctttttagcagccttcctaaatccttaatctaattttgatgttccccaatcacactcccataggcaatgaagatacatatacatatgcttctggcaatgactgagttacctacctcttctccatacaattaaattaaaacctccttaatgtcagggacctggtcatctcattcattagtataaaccagaacatcacacaaagtaggtattcgataaatgttataaaacgaataaataggccaggcgaggaggctcacacctataatcctagcactttgggaggctaaggcaggtggataacctgagatcaggagttcgagaccagcctggccaacatggcgaaaccccatctctactaaaaatacaaaaattacccagaagtggtggcacatgcctgtaatcccagctactcgggaggctgaggcaggagaatcacttgaacgcgggaggcagaggttgcagtgagccgagatcgcgccactgcactccagcctgggtgacagagtgagactctgtctcaaaaaaatcactaaataaataaatattcaagatttaccatctaaatagcatttaatctctagtcagtatcataattaaaagagtgatttggagtttttttattgtttgtaattttttgttttggggggggcctagaatttttctggaataaaatagcagctagatatttacatgagaatgtaaaaacgacaacgttatatcacatgcctgtgtatctcaagcctctgtatgagtctacaccagtcctagaaagaaggggaagcatgtatgaaatcatcttatttttggcagatgatgttaaatgtaaggtctatcaaaccataccattttctaatcccactaactggaaactatatacaaatgttcgtactttccttttttcccctgctttccactttatttccattttttttaaaggcttcctaaaatgatgtttattggttggttggtttttgagacagggtctctctgtatccaggctgaagtgcagtggagcaatcatagctcactgtaacctcgaagtcaggggctcaagcacccagctaatttttaatttttttgtagagacgggatttcaccatgttgcccaagttggtctcaaactcctgggctcaagcaatcctcccaccttggccttccaaagtgctgggattacaggcgtgagcaagcacacccagctgaccttatcttttttttttttttctttgagagaaagtcacaaagtcttgctctgcagtggcacaatctcagctcactgcaatctccacctgctgggttcaagtgattctcccacctcagcctcccaagtagctgggattacaggcgcacgccaccacacctggctaatttttgtatttttagtagagacaggttttcaccatgttggccaggcaggtctcaaactcctaatctcaagcgatccacccaccttggtctcccaaggtgctggattacaggcgtgagccactgagcctggcccaaccttactttttaaagaactctaatgaataagacataaaaaggatatgtttatgccagtgacttattttattttttattttatttttttttttgagatagagtctcgctctgttacctacgctggagtgcagtggcatgatcttggctcactgcagcctctgcctcctgggttcaagtgattctactgcctcagcctcctgagtatctgggattacaggtgcacgccgccacgcccagccaatttttgttatttgaaaaaacaccaagacagggttttggcatgttggccaggctggtctcaaactcctgacctcaagtggtccacccgcctcagacttccaaagtgctgggattataggcatgaaccaccacacccggcccgtttactgttttttgtttggtttgtttttttttattgagatggagtctcgctctgtcgctcaggctggagtgcagttgagcgatcttagctcactgcaacctccgcctcccgggttcaagcgattctcctgcctcagcctctcgagtaggtgggactacaggcgcgtgccaccatgcccagctaattttttgtattttcagtagagatggggtttcaccgtgttagccaggacggtcttgatatcccggtctcatgatctggccacctcagcctcccaaagtgctaggattacaggcgtgagtcaccacacccagccggatttttttttttttttttaatagaggcaggttcttactatgttgcccagtctggccttgaactcctgggatcaagcaatcctcccatttcagcctcccttacagctgagtctacagtcatgcccaggcacgcctggctatttttttttttttttttttagtagagatgggtggtcttgatatgttgcccacgctggtcttgaactcctggaatcaaacaatattcctgcctcagaaaaaataggtttgtccaccagagtttttaacatctaaaaaagactttctctttctcctgcctctcttcactcctccagttagttctacattcagctactccttggcagccctagcctggctcctattttgtcctcctctttcaaccaacaaaaaccccaaaatgctctctccagtcaaagaaaatttccagttcaacgtcctccctactggcctctctcatccctcagtcacactatcaccccacaggctcctttatgtttgctctcccaaaattagattcttccctgttgttctttcctctagcacaagctttgcttttcatattacattgtgtcaaatatatggttcataataatagccacaatttattgagactttgccatggctaggcacttcccacatcttactaccaggaccctgcaagcaaaggttaaacaagcctatggtccagatgaggacaccatggcccacctctctaactgaccggcccaaagtcactgagtgggcaagcagcagggctaggattggtgccagcgtgtctggctcttaatttttttagttcaccagaacataacataagtcttattaacataatctgctttatctatttggtatgaatttgcggggctgtgtaagaaaggtttgctgccagttttgagacttgtctgtttgcaacaggctacatctgcatctgctttacctaacagttgccaccccttgcgttatatactatgtgtcagaccctgcatgcaataagtgcttacactcacttatccctgaagaaccctacgaggtaggtaaattacacttacttgacatacaaaaaaaaggtgtcctatatgacaggtaaggtacatggaggctgcaagccccatccacttaaacctctgagttgtctcacttttatggctcccctatctttctgccagcggcattcaagaaattgatgtctggggcagggtgccgtggctcacactttgggaggccaaggcgggcagatcacttgagttcaggagtttcagaccagcctggccaacatagtgaaaccccgtctctacaaaagatacaaaaaattagctgggtgtggtggtgtgcgcctacagtcccagctacttgggaggctgaggctgggagaatcgcttaaacccaggaggcggaggttgcagtgagccaagatggagccactaaactccagcctgggcgacagagcgaaactccatctcaaaaaaaaaaaaaaaaaaaaaaaaaaaagcctaagagaagagtggagtaggaagaagtgactagagtgaccagaaggcctcaggattaggaagaagtactgagatgggagggaacacagccatgaagaaaatgccttgggagcttcagggaaaggaagaggtttgagtagaagccaccttaaagcgccagaaatcatgattaagagaatctaagtcagtgaaatctggctcagaggtgactcctccctcagtagaaattccacatacaaaaaaaatccaagctcatgtctacggcattcagatcaaataaatatttattgcctatccacctgtaatgggtactctgtttgcaagtatcatcaccaaaacaccatagggtataagaaggtgatagtgctatactcactgttcagaggaaaatggcccagagaggtgacatttctttctggagcttacacagtaacatatggacagaggcccgaatgcaggtccatttgacccaactatcatgttctttcccccaaatctcagctacattagtaaacattacacataaaaagaatatccacagtgtatgtgcatgctccatttgagaaaagatgtaatagcactaactctgaaattatttttaataaactgtaacttactggtggagaagcaaaacgacaagatggagagctgccacaggagcttccagagacagaaccagaatacatgggcactggaactgggcaagctaggggaagaaacacaaatgaactacatcattttgtagtgcagtcacatgacctgtataacagaaacacttgccaaaactactacacctttgtgttcccccaaaatctgcatttacctatttattaccacatctgctgatgaaactaaaaatgcagcaattactaaaactatttcaacttcgtttcagaaggaaaaatagaacagttattaaataaacacaaccgtaggtatctaagaaaatcaggctgggagcagaggctcactcctataatcccaacactttgggaggctgaggcaggaggatcacttgaggtcaggagtttgagaccagcctgaccaacatggtgaaacctcgtctctactaaaaatacaaaaattagccaggtgtggtagtgcccgcctgtaatcccagctactccagaggctgaggcaggagaatcacttgaaaccaggaagcagaggttgtaccactgcactccagcctgagtgacagagcaagactccgtttaaaaaaaaaagtagctgggtgtggtggctcacacctgtaattccagcactttgtggggctgaggcgggtggatcacctgaggtccggagttcgagaccagcctgaccaacatggagaaaccccatctctactaaaaatacaaaattagccgggcatggtggcgcatgcctgtaatcccagctactccagaggctgaggcaggagaatggcttgaacccgggaggtggaggttgctgtgagccgagatcacgccactgcactccagcctgggcaacaagagcgaaactccatctcaaaaaaaaaaaaaaaaaataaataaataaataaataaattcaatgaaattttaggagtcacaataaaagatgaattttgtagtaaaaatcattaatttttcctaaagcttgcattcattctttaagtgaaaatacaaaaaatggatactcacatttttttactggaccttgctcaagaaaaggatggctaaaaaatgcttctgtaacaagaaatgagaatgcaacctttaaagagacattgactaaactatcaaccaggttattttttctcaacgtattcaatataatgtctttgagatcagaatttaacttctttatataggctccatttcctttaaatgtaaaagcgtattttttataaatcctctataaaataattatttttataatcatataaaataatgaatcaataacaaattttaaataattacgaattctcaaaacatctatcaccagcacaacatactctgatgctacttacacagacatgttctctaacgtatgccaccctccagtggacagccccacaggagaactgtgatcaccaggcccttgttaagcacccatgtgaactacagctgttaattgtcctaagaggaaattgatacagctgatttatacaacaaactatccttcgcccctacaagtattcctgatgctggtttcacattaaaaagagaaaaaactggccgggtgtggtggctcacgcccgtaagcccagcactttgggaggccgaggcaggcagatcacctaaggtcaggagattgagaccatcctggctaacacggtgaaaccctgtctctactaaagatacaaaaaattagctgggcatggcggccggcgcctgtagtcccagctactcgggaggctgaggcaggagaatggcgtgaacccgggaggcggagcttgcagtgagccgagatcgcgccactgcactccagcctgggtgacagagcgagactccgtctcaaaaaaaaaaaaaaagaaactacaaaaacaatacattcaataattttaaaaccattctccataatagttgtttcactattgaccataattctcatggttcagagcaactctcagcttaacttctccctaataggtataaatatttccaactacatgaacttaattttagtccaactttacaaaacattaagaaaataggtattcagaccatttcatcttttccccgacatggaaacaattacagctatcctctactgagtattcaacattcactaagacaatgaactgggtgcttcacaaaccttatctgaggaagtatgtcctcctatgatgggtaataaaattaaaagcacacaaaggccatgtttcttgtccaatgtcaaagagttagtaaggtgagggactagaattcaaattctagtccaacttatttaaataccaatgtgggtttccctattatactatacattagcaaaccaaaatcctggagtatatttccacaaatctctgttagtattacaactattactacaggaaaagtcaaacacttttttccctaaaaactacaagatcagggttaatttgctaagtattttcattaaacatgtcttaatgatttctctggtctgacattttcaagtagctgtttttacctaagataagaattaggttggaccgggcgtggtggctcacgcctataatcccagcactttgggaggcagaggtaggtagatcacctgaggtcaggagtttgagaccagcctgaccaacatggagaaaccccgtctctactaaaaatacaaaattaacaggcatggtggcacatgcctgtaatcccagctactcaggaggctgaggcaggggaatcgcttgaacccggaaggtggaggttgcggtgagccgagaacctgccattgcgctccagcctaggcaccaagggcgaaactctgtctcaaaaaaaaaaaaaaagcaacttccaaaaactttaagataaactgatgagacccacacagagttacagaatcaaactttcaaaagacagagagaatcttggaagcaagagagaagcaacttgtaatatacagggatccttaataagaatatcagccaatttcccatcaaaaatcttgaggccagaaggcagtgggatattatctaaagtgctgaaagaaaaaaaagttaactgagaattctacattccacaaaactgtccttcaaaactcaggaagaaattaagatatccccagaaaaacaaaagctgagggaattcattaccacaagacctcccctataagaaatgctaaagagagtacttcaggttgaaatgaaaagagctagacagtaaaaagccacatgaagacatgaagatctccggaaaagataaatgcactggcaatttaaaatccaatagtactgtaattttggtttgtaacttcactttttcactttctacagagtttaaaagacaaatgcattaaaattatcataaagatataatttgtgatatcaacataaagggggtataaagcaatacagaagtagagtttttgtgtgcaactaaagttaatatgaattcagtaactttagatgttatatgtaatccgcaggtaaccacaaggaaaaatatacacagaaggaaatgagaaaggaatcaaaacacattactataaaaaacaacactaaagagagcagtaatgggagaaatgtgggacaaaaaagctgtaagacataaaaatagtaaaatggtgaaaatctttcctcatcagtaattactttaaatgtaaatagatctccttaggcagagactggcaaagtagattaaaaggaaataatccaactataatctgtaaacagaacagagactccctttaggccatgtgaggtggctcacgcctctaatcccaggcagatctcttaagctcaggaattcaagaccagcctgggcaacatggtgaaaccaaaaatacaaaaaaattagctaggcatggtgctgcacatctgtggtcccagctgaagtgagaggatcgcctgaactcgggacacagaggttgcagtgagctgagattgtgccactgcactccagcctgggtgaaagtgtaagactccatctcaaaaagaaaagaaaaaagaaaaagagactcgctttaaatctaaagacacaaatatttgaaagcaaaataatggaaaaagctattcccaggcaaatactaagcaaaagagaagggcaaagttgactatcagacaaaatagaatttgaattgaaaactgttataaaagacaaaaagtacgttaaataaggccaagtacactggcttaagcctgtaatcctagcacttgggaggcccaaggtgggtggatcgtttgagttcaagagttctagatcagcctggaaaaaatggtgaaaccctgtctccacaaaaaatacaaaaattagccaggtgtggtagctttgcacctgtagtcccagctacttgaggggcagaggtgagaggatcacttgagcccaggaggcagaggtttcagtgagccaagactgcaccaccgcactccagactaggtgacaggatgagaccctgtcaaggaaaaaaaaaagggggggggctgggcacggtagctcacgcctgtaatcccagcactttaggaggctgaggagggtggatcacaaggtcaggagtttgagaccagcctgaccaacatggtgaaatcctgtctctactaaaaatataaaaattagctgggcatggtggcaggcacctgtagtcccagctacttgggaggctgaggcaggagaatcgcttgaacctaggaggcggaggttgttgcagtaaaccgagatcgcgccactgcactccagcctgggtgacagagcgagactccatttcaaaaaaaaaaaaaaaaaaggtattaaataatgatagaagggtcaattaaccaagaaaatttaagatttataaacaatcagagccccaaaatacatgaagcaaacattgacaactgaagtgagaaagagatttgtacaataatagttggagacttcaatatcccaccttcagtaatggataggataaccagatacagcatcaataaggaaagggaggcactgaacagtgctataaactaactggacctaacagacacacgcagagtactctagtctctgagagcagagcatatatttttctcaagtacacatgggacattctccaaaacagaccacaccttaggccacaaaacaagtcttaataatttttttttttaatcagagacaatgttgcgctctgttttttcaggctggaatgcagtggtgcaattagctcattgcagcatcaaactcctgggctgaagtaatccctcttacctcagactcccaagaagctggaactaaaggtgcataccactacacccagctaatttttaatattttttgtagagacaggttctcactatgttgccctggctaatctcaaactcctggcctcatgcagtcttccttcctcagcctctcaaagcactaaggttacagatatgagccaccatgcctggcccataaattttaaaagattgtaatcacggtgactgattatcttttccaatcacaatggaataaaagtggaaatcaagggccgggcgcagtggttcatgcctgtcctttgagattgtttaaaaaaaaaaaaaaaaaaaactagaaatcagtaacagaggaaataacgggaaaatccacaatatgtggaaattaaacaaaacactcttgtgttactctgttttcgcacactataaagaactacttgaggctgggcgcagtggctcatgcctataatcccagcactttgggagccccaggcagcctgatcgcttgagaacagaagttcaagaccagctggccaacatggtgaaaccccatctctactaaaaatacaaaaattagccatgcgtggtggcacgcagctgtaattcccgctactcaggagcctgagacaggagaatcgcttgaaccccggaagtggaggttacagtgagccacgattgctccactgcactccagcctgggtgacagagcaagactccgtcgctaaaaaaaaaaaaaaaactacctgagactggccattttatgaagaaaagaggtttaatttagttctccatggctggggaggtttcaaaaaacttacaatcatggcagaaggtgaaggggaagcaagcatgtcttaccattgcagagcaggaaggggatgtaccacactttcaaaccatcagatcttgtgagaactcactatcacgagaacagcatagaggaaatccgcccccatgattcactcacctcccaccaagcccctccccattcactcacctcccaccaagcccttccccgtctcatctcattcaagatgagatctgggtgggacacagagccaaaggataccaactcttaagcaaccatgagtcaaagaagtcataaaggcaaattagaaaatatcttgagacaaatgaaaatgaaaacacaacatactaaaacttatgggatgtagcaaaagcagtagtaagagggaaaaatatacctgtaaacacctcctttaaaaaagaagaaataaggccaggtgccgtgccccacgcctataatcccaacactttgggaggccaaggcaggcagattacttgaggttgggggttcaagaccagcctggccaacatggtgaagccccgtctctactaaaaacacaaacaaattagccgggcgtggtggtgggcacctgtaatcccagctgctcaggaggctgaggcagaagaatcgctttagcccaggaggcaggggttgtagtgagtcaagactgtgccactgcactccagcctgggcgacagagcaagactctgtctcaaaaaaaagaagaaataggccaggcatggtggctcacacttgtaatcccagtattttgggaggccaaggcaagtggatcacctgagatcaggagtttaagaccagcctggccaacatgatgaaaccctgtctctactaaaaatacaaaatagccaggtgtggtgacttgagcctgtagtcccagctactctggaggctgaagcaggagtatcgcctgaacccaggagctggatggaggttgcagtgagccaagatgacgccactgcactccagcgttggtgacagagcaaaactccatctcaaaaaaaaaaagaaaaagaaacatctaatcaataagctaacttcatgcttatggaactagaaaaacagcaaactaagcccaaaactagtagaaggaaagaaataataaagattggagtcaagataaatgaaacattttctttttttttttttttctttttatacagggtctcattctgtcacccaggctgggtgcagtggcatgaccacagctcactgtagccttgacctccagggctcaagcaatcctcccagctcagcctcctgagtggctgggactacaggcccacaccacaacaccagctaatttttgtatttttagtagaaggctttcaccacgttgcccaggctggtctcaaacacctgagtttaactgatctgcccatctcggcctcccaaagcgctgggattacagatgtgagccaccatgcccagctgtgcttgaacttttagtgcattccccaagccacacacagatctatggacaaaggatggtaacttaccatctcaaagcaccacctttgaccaataactggctgaccactaaaaaactgtagacaaaggggtgacccctaggaaactgggctttacaatttttttaactgaaaaaaatacaaaaacaattttggagataaatcaatgttcaaaaactgcaaggaaaacaatattccgcagatttcgtccacgcaagttactaaacaaatagaacaatccgaccaggcatcgtggctcatgcctgtaatcctagcactttgggaggccgaggcaggtggatcacttaaggtcaggagttcgtgactagcctggccaacgtggtgaaaccctgtctctactaaaaatacaaaaattcaccaggcgtagtggtgtgcacctgtaatcccagctactcgggaggctgaggcaggagaattgtttgaactcgggcggcggagcttgcagtgagctgagatcatgccattgcactccagcctgggcgacacagtaagactttgtctcaaaggaaaaaaaaaaaaaaaaaaaaaaacagaacaacccccaattgggagagggggagggttcaaatctaaagttgctatctgtattgaacaaaatgtttgatttttgacaaaaaaccgcaaggcatgcaaagcaacaaagaagtatggcccatacacaggggaacgaagcagtcaatagaaactgtcgtgagggggccaaatgttgaacttaacaaagactttaaagcagttattataaacaaattttttttttttgagacagagtctcgctctgtcgcccatttttaaaagtagagaaagccagccaggcacagtggctcacgcttgtaatcccagcactttaggaggccgaggtgggtggatcacgtgagcccaggagttcaagaccagcctggcccacatggtgaaaccccgactctattaaaaacacaaaaaattagctgggcatggtggtgggcgcctgtagtcccagctatgcaggaggctgaggcaggagacagcgactcatcaaatagagaatatcaagaaaaagacagaaattataaaaaagaaccaaacagaaaatctggagttaaaaagtacaataactgaataaaacaatcagcaaggctgagaacagattaacagatatttccaatctgaaaaactcaaaggaaaaaacaatatggaaaaatgaacagactcagctgtgcgacatcatcaagcatagaccattaagtgcacacaatgggagtctcagagaagagaaagagaaagggacagaatgaatattttaagaaatgatggttgacaactccccaaatttggtgaaaaacatttatttatatatccaaaaagatcaataaactccaggcaggataaacacagagatacacatctagacacatcacagttaaaattgttgaaaatcaaagacagagaaaaatctcaaaagcactaagagaaaaatgactcatcacctactagggaaacctagtaagattaacaggtgacttctcatcagaaacaatggaggaggccagaaagcagtaagatgacatagtcaaagtactggctggagaaaatcctaacaaccaagaattcagtatctaccaaaaaaaaaaacacttttccaaagtgaagggaaataaagggaaataatgacattcccagataaatgaagattctgagaatttgtataaagagcattggtaattatgtagataattatggaagacagtacattatatatttttctcttagccgatttaaaggacaactgtataaaataattataaaattgtactattgggctttgtaacatacaaagattaatatatatgacaacacaaaagaggaggaaaggaatggaattatattagaactaaaaaaatgacaccaaacaaaaaagagatacaaaaaatacaaaaagaaaaaaaaaatgacaccaaacagtaacttgagtccgtaagaataaatgaagagtgtcagaaatgataaatgtataggctaaaatagtaatctaaggctgggcatgatggctgacacctataattccagcactctgggaggccgaggcaggatgtgcgcttgaacccaggagttggcaaccagcctgggcaacatggcaaaaacctctctacaaaaaatttaaaaattagctgggcatggtggtgtgcacttgtaatcccaactatacagaagtttcaggcaagaggatcacttgagcccaggaggtcaaggctgcagtgaggcttgtttttaccaccgtacttaggcctgggtgcagagtgagactctgtctcagaaaaaaaaaaaaaagagaaacacacaaaaagacgctatacatgtttttcacctttcttctcctcacttcttaaaaagaggtaagactgtataaagcaatcgtcctaacaccccactgctgagattacaacatagacataatatgtaagacaacagcacaaagggaagagcgaatggagccatattaagggaacaaagcttctacattttaatggaattcaactggttttttggtttttgtttcttttttttttggagatggagtctcgctctgtcacccaggctggaggagtgtagtggcgcgatcttggctcactgcaagctccgcctcccaggttcacaccattctcctgcctcagcctctcgagtagctgggactacaggatggtcttggtctcctgacctcgtgatctgcccacttcagcctcccaaagtgctgggcttaacaggcatgagccaccacacccggcctcaactagtttttatataaagtagactgtgataaattaagatgcatactgtagaggccgggcgcggtggctcacgcctgtaatcccagcactttgggaggccgaggtgggcggatcacgaggtcaggagatcgaaaccatcctggctaacacggtgaaaccccgtctctactaaaaatacaaaaaaattagccaggcgtggtggcaggcacctgtagccccagctactcgggaggctgaggcaggagaatggcatgaacccaggaggcagagcttgcagtgagccgagatcccgccactgcactccagcctgggtgatagagcaagactccgtctcaaaaaaaaaaagatgcataccgtaatccctagagcaatcattaaaaaaaaaaatacatagtacaaaaaagccagaacactcaatgaaagaatttaaatggcacactagaaaataatctattttgactaggaacaatggctcatacctgtaatcccagcactctgggaggctaaggcaggaagatttcttgaagccaggaattcgagaacagccctggcaacattgtgagaccctatccctacaaaagggtaaaaaaattagccgactgggccgcgcccggtggctcacacctgtaatctcagcactttgggaggccaaggcaggtggatcacctgaggccaggagtttgagacaagcctgaccaacatggcaaaaacccatctctactaaaaaaaaaaaaaaacaaaaattaggccgggcatggtggctcacgcttgtaatcccaccactttgggagaccgaggcaggtggattatgaggtcaggagttcaagatcagcctgaccaacatggtgaaaccccatctctactaaaaatacaaaaattagccgggcatagtggcatgtgcctgtaatcccagttactcagaaggctaaggcaggagaatcgcttgaacccgggagacggaggttgcagtgagccgagatcgcgccactgcactccagcctgggcaacagagcaagactccgtctcaaaaacacaaacaagcaaaaaaaattagccgggcatggtgatgggcacttgtaatcccagctacttgggaggctgaggcaggagaatagcttgaacctgggaggctgcaacctgggagcttgaacctgggaagttgcagtgagccgagatcatgccactgcactccaggctgggcaacaagagcaaaacttcgtctcgaaaaaacaaaacaaaacaggctgggcatggtggctcatgcctgtaatcccagcactttgggaggctgaggtgggcggatcacaaggtcaggagttcaagaccagcctggacaagatggtgaaaccctgtctctactaaaaatataaaaaattagctgggcatggtggcgggcgcctgtaatcccagctactcgggaggctgaggcagagaattgcctgaacccaggaggcggaagttgcagtgggccaagatcatgccactgcactccagcctgggcgacagagcgagactctgtctcaaaaacaaaacaaaataaaacaaaacaaaaaattagccaactgtggtggtgcaggcttgtagtcccagctactaaggaagctgaggtgggagaatcacttgcacccaggagttcaaggttgcggtgagctacgatcacaccactgcattccagtccagcctgggtaacagagtgaggccttttctctaataaaagaaaaaaaaaaaacaaaagaatctatttaataaatattgcttggcactgtggctcacatctgtaatctcagcattttggcaggccaaggtgggtagatcgcttgagcccaggagtttgagatcagcctgggcaacatgacgaaaccctgtctctacaaaaaaaatacaaaaactagccagaggtggtgttgtacacctgtagtcccaggtactggggaggctgaggtgggaggatcacctgagcctgggaaagtcaaggctgcagtgagccatgatagtaccactgcactccagcctgggtgacagagtaaaaccctgtctcaaaaaatataaaaataaataaataaataaatccaggctgacaactccccaatctgtccccagtctagacttttctgaaattcaagtgcacttctgacatcgacacttagatatccaatggttatcttaaatttaacatgtccaacagaaactcctcatcttgtccccatagcctgctctatccatatagtctttcccatcactgtaatcgacaacatcctttcagctgctcaggccaaaaaccttggagtcatccttgagtcttctctctcacaccctcacattcaatctatcagtgaatgctgttgcctctaccaccagaaagatttcttaccacctccactactattaccctagtcaaagctacactcatctctcacctgggtaacgacaagagtctcctgattagtctcccagcttctgctcttccccttacatgcacacagtctattctcaagcagcagccagcttgatcctttttaaaaacattagtcacatcacttttcttccactcaaaaccctctaaatggctcccatcacactttgtggaaaagcccaagtcttcaactggccttctagttgttcctcaagcttacaggcatgctcccagccctcatcatttatattggctgttcactctgcttaaaaagctcttcccacagatatccacatggctcactctcatttcaagtcaagtctttgttcaaatgtcactttctcagtaaggtcttcactgactaccttatttaaaatttcaatccccacccccaccccacccccacttctttattcccataatacttagcaacttctaatataatatataattatggtttttaatttgtttattgtctctaccactagaatatatgttacatgaggagagtgattttattactctatctctcgtacctagaacatagtaataagcactcaataaatatttacgaaaccagtgaaggaaataaacaaaaagaaaagtgaaactgactttaattttctgaaatctctagtttttaaatctttcggcatatataacaataaaattagaaaacatgcaaaagttaaaactatttcttaccaaagtccattctatctttttggtttctctgaagcaaacccaaaaggagattagccaaataaggtgatgtttctctgggaatactgggggaaaggaaaaacacaaccacctaagtgataagtttatatacataaacattaacttttgccttccatatagtaaactaaaacgtgtatgcggtttcacaaataccaatacatttataccacgaagaccatgtaagagtcatctaaagaagggaaaaaagccgggtgctgtggttcacgcctgtaatcccagcactttgggaggccgagacaggtggatcatgaggtcaggagatcgagaccatcctgactaacacggtgaaaccccatctctactaaaaatagaaaaaaaaaattagctgggcgtggtggcgggcacctgtagtcccagctacttgggaggctgaggcaggagaatggcataaacccgggaggtggagcttgcagtgagccgagatcatgccactgcactccaggctgggcgacagagcaagactccatctgaaaaaaaaaaaaagaaggaaaaaaagcactaaattgcctttgagaaacagcatcaaattgagaagattcctgtattgtgcttgctgttgttttgagtatctgcaggagtaaggcacctcaaaagcccaatgttgacttttagcatagcttcaatcttgcactaatagttgttataatgttctctattacaaagtagccacctccatttctgtctggaaaagggcagcacttaaatacaagtgagaactaatacaacttcctaacatccgatatgaaaacaacaagcaacaggaaaatgaattaatagcagtacacaattcaaagaataagaattacaaaaagatattaaacaggctgggcacggtgtctcacacctgtaatcccagcactttgggaggccaaggcaggtggatcacttgaggtcaggagttcaagaccagcctgaacaacatggtgaaatcccgtctccactaaaaatacaaaaattggccggtgtggtagcctgcctgtagtcctagctacctgagaggctgaggcaggagaatggcttgaaactgggaggtggatgttgcagtgagccaagatcgtgccattacactccagcctggcaacagaacaagactctgtctcaaaaaaaaaaaaaaaagaaagaaaagaaaagaaaaagatattaaagaaatacaaaggagccaaattcactaataaagagaataatgcaaattaaattaatagctaactggtcctcatgcatttgtgcagcatcaaatctgctaacattccatgttggtaaaaatgagggaaaaggagcagtcttctatcttgctgtattcactgggacagcctatttggagagtgtatcttttggtctgacaattccatttctaggagtccaccctaacaaaatgcacacatacacaaaggagtacacacacatacacacacacacacacacacacacttcactagagcctgtttgcagtaaccaaaaaaatgaaaacagggatctgattaaataaaataatgtacatctatgggactctctgtggcatttaaaagcatacagtggcaggtgcagttgagctctgggtcaccaagatgtcgttcccaaagtatactctatcacgcctggccactgtgcccccgaccctcaacccagccgaatacaacatatctccggacacccgacgggcgcaagttgagcagttggccataagagccgggctgaaatgagagtacctgcttcagtacaacaaccccaaccgcagagggctcatcgaagatcctgccttgattcgttggacctatgcaagatcagcaaatgtctatcctaatttcagacccactcctaaaaactcactcttgggcgctctgtgtgcatttgggcccctcttcttctggtattgtgttttcaaaactgacatggatagaaaagaaaaacttatccgggaaggaaaattggatcaaacatttaacctctcatattaagtctgtcaatgatgactatatgtactcctgcctaaatagtctattaatcatttaaaaaaaaaaaaaaaagcatacagttggccagatatggtggctcatgcctgtaatcccagcactttgggaggatgaggcggggggatcacttgaggtcaggagttcaagaccagcctggccaacatggtgaaactccgtgtccactaaaaaaaaaaaaaaaaatacaaaaattagaggggcgtggtggtgggtgcctacagtcccagctactaggaaggctgaagcatgagaatcacttgaactcgggagggggaggctgcagtgagccgagatcatgccactgcactccagcctgggtgacagagcaagactctgtctcaaaaacaaaaaaaagcatacagtgcctctctacatcttgctgcggaacatcatctgtgatgtgctacaaagtaaaaaacaaaaggacgctgcaaacaactcacaaaatatgatgtaatttgtcttaaactatgtgtgtgtataaatacatacataaacaagcactcatctcaagatacaagttcgagaggaaaaaaaaaggaaaacaagcattcaaacacgtataaagaacacccaaaaaactatgaagacagagacacagcaaactcttgttacccctaaagagagcaaagctggggggaattcacttcctactttatgcgtatctattctattctgtccacattaccctccccacaaggaacacatgtaacttccgtatctttttcttttaaatttacattttaaaaaagaaagaaaagagtacagcactacacagacacctatgatgtgccagcaattttctaatttgttgtaacaaatgctttcacattatcaactgaaaaagaattaaaaaatgagaatacacaaaacacaaacagttcaaataaacaacactgtattcacaaatagtaaaacccagtgtaatctaaacacatacctaggcattaagctcctgtttttttcataaaacatccttaagtcttgaggactattggcctattaaaaaaaaaaaggtttaatttcctaaacaatgggggcaaaactttcaaatcatatgattgacactcatatgctttttttttaagggattgagggagtgggagtttcaaggaagggactgctgacaggaaaggagggaaagtatgagggaggaggaaagcaaagagagatgatgctcatattcttgctacagaacatagactatcaacttgaaagccatggattgctgaaggacccataactggtcattaggaactcataaaacctatgacattgtgtgaaaattctgtacatctgagtataacgtaccttttctgaggtaccttttctgaagtaccttttctgaggtcagactctgagaggagcctgaaacttagaatagattaaggaccactattctgaaggttacacggcctgcccaataggtacattattgttgggtaaaattcaggtgtactttaccttaggaccctaaaggaattcaaagaaaagaactatgtatactgctactattcagtctctccacaacaacaaatagctgataacaacagctgctgaattagtgaagcctcctctacatgcaaactagactaagaaattaaaagtgtttaacctggctgtgtcactaattttctttttcttttttttttttttttttttttttgagacagagtttcgctcttgttgcccaggctggagtgcaatggtgtgatctcggctcaccgcaaccttcgcctcccaggttcaagcgattctcctgcctcagcctccctagtagctgggattacaggcatgtgccaccacacccggctaattttgtatttttagtagagatggggtttctccatgttggtcaggctggtctcgaactcccgacctcaggtgatctgcccgcctcggcctcccaaagtgctgggattacaggtgtgagccaccacgcctggccatcactaattttcttaatactatctcgggcaaatattttcactttgtttcagttttcaaattcgaagatcttctttgtaacataagaaattataacatggcaatatgaactcaagagaaatcatcgtgattatactctacagggtcactttttggcaggatgttgggggagaggaggagaagacagacccataataatttccataaagtgtatataattacctccctctcacctagcagtgtcagaaatagagagctagagatggtttccagagatctccccagaccagccccagccctcatgtggattccgggatcccaaaaccaggctaactaggaagctctggtgtcaccattcacacccatttcccaccaggctgttagccccgaacccaacatacaacagacttcatgcccagtccaactacaaagggcaggcagataaaaggggaaaaccaaaagacgttctgactcactaaagcagtttttgcctataacagaatcaaagtaactcacagaggagccaaaaacactgctttcaaagtattcttcattttacaaatcaaacgcaactataaaatgacaagatcccaaaactgaggacataagaaaaaagtcagcctacctgaaaaggtggttttccaactaggcattggtatatcactgttcctatgctccacaagtcagccttagcatcataatgttgagacataataacctcaggagcctgggaacagaaaaatttaaggggcatgccgtacgttatttacataattaatatgcacatattaattaactggtaaaggtgacacttctaacaaactaccagaataaaacaacaccctgtgatagttctctaatcaaataataaggcaaagaacttacaacatattattatatattgagatttactagtaaatctcaaaatcaatgttgcatgaaaagaggcaagttatagaaacaaatgtttcacctgattataatggacacataaagtacagtaagagggccgaaagagtaaagaaaaatacacaccataggacatggtgtataaaatacataccataggacagaggttccctcaggtgtgtgagaggagcagaggaggaaatgcaatcagggagaggtacaaaaggaacttgggctgtctccaaaatattttttcttttttttttttttttgagaatgagtctcaatgtgtcacccaggctggagtgcagtggcgtgatctcggctcactgcaacctccacctcctgggttcaagtgattctcctgtctcagcctcccaagtagctaggattacacgcgcctgcaaccatgcccagctaattttttgtatttttagtagagacaaggtttcaccatgttggccaggctggtctcgaactcctgacctcgtgatcctcccacctcagcctcccaaagtgctgggattacaggcatgagcccctgcgcctggcctatttgatttctttcaaaaacaagatcaagacaaacatggcaaaatgttaactttgtgaaatacggatggtgggtacataggtgtttgctatattattccctatgttttttgtaatctgaatacttttatagtaatagaaaaactatgatgcaaaaccccacacaatactaaaaattgtcctaaaagcaaaaccatttctctgctgctttgttacgggtattttcccacctctcatcaaatgttgcattttaaatataccattaatcaggacaaatattaaacagaaatggaaaatatacttaaagatagttttatttctcagatgtaacatttccttttaactttaattctttgtggaaatgggatcttgctgtgttcacaggctggccatgaacgcctgagaagtcctcttgcctcagcctcccaagtagctgggactaaaggcacgccatcactacacccagctcaggcataacatttttatttattttccctagtaaatttcttattaagtcaatatcctttaataatcagccaaagcactctaacctcaaggctaaactaattttatactcaagaagtacaaagtaattttaaaatttatataaaattataaaattatatataagcagtaaaattatgatcaagactataaatctaataaaatttttttgaaatttgattaccagttcaaagttgattttagtttagagaaattttgaatttaatataaacccattttaaatttagaactgaaataggtacatttattttacataattctgaatctctagaattaaggtatttccagacttaatactgcacattacattagaagtttcatagcctaaccctataatacatgatgatatctatatgagaggataaaggggaaagctgagatatttcagctgtgtgaggctaatggaaaaaacatctacaacacagggatcctgtcacgagagttaacatgcaaaagataagcacatcctacagctgaagaagtgctcccagaagatgttttttaaagcactcttatattatacattatgtacagcatgactacccttgattaatttttattttcaacttaatagatttgtctcataactaatcttttttaaaaaataaaaacaaatgggcaaaaatgacttacttttacagtccactatgctaaggcaaaagatgtctgtattatagcattatcagtaatataattaacattagtaataacaacttggactatatgtaaaatcacatcttatttggaagcacgcattatatttaaattccaatgattatggagccatgctttaaacacacaaggatgcaaacactcactcaccatgtacatcggggatccacacagtgttgcagccatcatgttactatgtaggtaacgagcaaaaccaaaatccgctatttcacaaaacagaaagtagaaaagcaaattacgtcttcgctcatacctaacatatatcatatgattcttcgagacacaagaaggcacaaaggactgtgaaaaataaacagcttattgaattagactgtccaccaaaaaaaaagtagctaccttgatttcagcaagctaaaaatagtagtaatcgtcaactgtacaagtcactgctctgccagatttgtaaccaaggtgtacgaaactttgcaagtgaaaatgctaattataataagtagctcattaatacagttttcattaaatatcaataccagatgtagaatgtgaacaattatgcttttattgtttcaaataattttgaggtactactaaaaaaaaactgccaagggctaaactagatggtctctgagatccctacgtcaaaagcctaggaactgtaaagaatcagggttatggccaggcgtggtggcccacacctataatcccagcactttgggaggctgaggtgggcagatcacctaaagtcaggagctcgagaccagcctggccaacacggtgaaaccctgtctctactgaaaaaaaaaatacaaaaaaaattagctgggtgtggtggcacatgccagctacttgcgcatcccagctacttgggaggctgaggcaggagaatctcttgaacctgggaggcagaggttgtagtgagccgagatcgtgccacagcactccagcctgggtgacagagcgagactccatctcagacaaacaaacaaaaaaagaatcagagttattaatttgctgccagtaagcacaccacatcaattttcctctcgagagacgcaggtattcatatttagagctcctgatgtgggcctgtcagcactgcctgagacttggcagaaactgtcaataatgtaaaggattcacctatctaagagaactccacgatctcaataaaaatatcagattgcatcaataaaatccatcatctggccaggtgtggaggctcaaacctgtaatcccagcacttgcggaagctgaggcgggcagatcacctgaggtcaggagttcaagaccagcctggccaacatggtgaaaccctgtctctactaaaaatataaaatttagctgggcgtagtggtgcatgcctgtaatcccaactactcaggaggctgaagcaggagaatcgcttgaacccaggaggcgtaggttgcagtgagccaagatcgcgccactacacgccagcctgagcaacagagcgagactccatctcaaaaaaaaaaaaaaaatccatcattcaacaaagctaaagttgtctaaaaatagtttcaaaaaatgtcctttccatgacacaatacatggccatttacctattttgatgcgaataccactgacacttgattttctgcgattggcataggacagcaagatgttctgtggtttgagatctctgtggatgattcctttgctgtgcaggattcgcatggcagcagcaatctgatgcagaaacactctgatcgtgtcttcactgagagtccctttcgctggtacaaaaggagtcacgtaaatatttaagcacacaaaatcaaataccatctgcatattccatcaacaggattgggttgtgaaggagagcatgaagggaatgaggaatttggattcacatttatttatttttttaactttaataattgaagactatgaagagatatcagatttctcaaaacctgtagtcaatctgttgtaaagagaactgactggcactttcaccttttgtttcacctgtggtttttgcttttccttcatgtttttactgctgaaggtgcccacatgactctgaacaccatatgtactcaataaatatgaatgtcctttacaagccaaaagctaagttcccttcatattagtcaaatatctggaataagtgtccatatttaattccaaccattatgtgagcacaaattaaaaacaagcaaaatctttgaccagagggatcagatactactgctacccgtgcctgtgaggcatctgtgttcctgcatctactctgtccttttatctcccacacccccgtcccactatctttcataactaaaaataccttaagaataaatgttttaaccgatttcaccactataaagaggtgatatgaacattatttgaaagtagtgagtcattattccgtaaatattttttttttgagacaagagtttcactctgtcccccaggctggagtgcagtggcacaatctcagctcactgcaacctccgcctcccgggttcaagagattctccagcttcagcctcccaagtagctgggactacaggcatgtatcaccatgcccagctaatttttctatttttgtagagacagggttttgccatgttggccaggctggtcttgaactcctgacctaagtgatccacttgcctcagctgcccacagtgctgggattacactgagagacatcgtgaccagcctattcagtaaattctatttctgtgtatgccagagcatgttgtggttaacagcttgacttgaagtctagctgcctttgttcaactcctagttcttccacttaatgtgtgacccttttgaaaagacaatccctctgtgcccaccttcctcatgtataaaagttgatgagaataactacgagttgacatgatgattaaataaaacccatttaataatgaaaacttgtgctcatttcagcagcacatatactaaaattggaacaatacagagaagattagcaaaaaatatttatattaaaaaaagaaaaaaattatgaaaactttagaaaaaggctttgcacatatttcaatgtagcaggtatgcaaatacttattacaatgagtctaaaagtcacaagtgtaattccttacctacactgaggatttagtatccatgtacctatttaaattattcgtgatgcatgtctgtccatataattcttagaatatgttctatataacctttccatttgtaaataagagagaaataacattagtatttggaacaagtgaaatactgtggttttaaaatcattttaatgacctgtcaagttttacatgtccttaacatcttcaaataaaataaatctttatggtttaaaaattatcaaatatggcccagtgtgtggctcacgcctgtaatcccagcactttgggaggctgaggcgggccgatcacgaggtcaggagttcgagaccagcctgatcaacatggtgaaaccctgtctctactaaaaatacaaaaattagctgtgtgtggaggtatgcacctgtaatcccagctactcgggaggctgaggcaggagaatcacttgaacccaggaggcggaggttgcagtgagccaagaatgcaccactgcactgcagcctgggtgacagagtgagacttcatctccaaaaaaaaaaaaggaaaaagaaaatactctggaggcacacaatttgatctgaatgcttcatatcctacatgtatgcattttgggttcagaatttcaagcaccatctaatattaaaatcttacttctgtaccacaaaataatttaaatgttacctttaatgccttataatttttgttgcctttttttaattacaagaaatattcacataaataccttcttggatatatttttccactataattttttaattttgaaagaaacgaaacggactaaaactcagtcaagccttttgaaggagaggaattctatcgggtttctcctctcctggggataggaccatctctcaaacactgtcagagagagacacacaaaaaggtaaatacttatatacaagtaaagcttagaaacaaaaccacaaacaacaacaacaactggtctgcaaagtgaccacaagtcaaacaaatacacaaatatttattgaatgtttctatacaagagcagaaaatgggtagtgtatttcacaagtacctcttaggattaaacaggctgcagcactgtctttactgaacactgacacacatacacagttaccttgcaaataatctgcgaggtctccaccattgcaatactgacatagaaaagagaaagtaatgaaaataaggacagtgattcaagattaattcaatccattctcaattgtgattaaaaaatcatttgtatataatgtcatgtaaatatagcctaaaaacattatagattcaaaattttttaaattttatattccttgagtagaatctagatcactgaatcaactttattaatacaaaaattcaaataatctactaccaattttaaagttcatattaatcaaaaaggatttgaaatatgcagatttatgctagaatctaaaaaaaaaaaaaaagaaatttgaaataaattaaacagaagtttgtatactacctacctccatcaccaaaaagacagagttgggtaattcctgaaaagtaaacatattaaatatcatttagagaaaaattaaacacaaaatttaaagataatgatagttaaaaataccatacttgttcattattaaaactggtaaaatgaaatcacaaaatctattagaaagtgaaattaaaattcccaacacaatgatgtaattatctcctctacaaagccaaatcaagttttggtaacactaatgtagtcatcaagaagtaaaattttgtttacagaaataactagagaaagattcatcttttggttatgattgacctaaaacaacagatctaggacaaaaagcatggtaaatttacaatggggaaaaaggaaggattctttggtccttggggaaacacttccactttgaaaagtttatgatttggagcagcaaaacagcataatcctccctagcaacactatatgcacagtctgatttctggaatatatgactcaggacgcctggttttttgtttttctgttttttatgtttatttggggcaatcgcattatcagcaattggtggcaaagggaaatgttttatcacattatcaacacatgttccacaatgttgaggaaatgaattgagggctcttaaaaagtctctcaaatccatatagctccaggtctgctgttgattaagtaactcaaagactgattagctggctcttcaatggcaatttttataacgataactaaaatttagattgaacttccctgtggcttaacttgagccagtgtgcaaatgtaattcaaaatatagcttttggccaggcgcggtggctcacgtctgtaatcccagcactttgggaggccgaggcaggcggatcacgaggccaggagatcgagatcatcctggctaatacggtgaaaccccatctctactaaaaatacaaaaattagccgggcgtggtggcgggcacctgtagtcccagctacttgggaggctgaggcaggagaatggcatgaacctgggaggcggagcttgcagtgagccgagatcatcgagatcatgccattgcactccagcctgcaagagagccagactctgtctcaaaaaatatatatagataggtctagatcgatctagacctatctatatctagatatatagcttttgggctgggcccagtggctaacacttgtaatcccaacactttggaaggccaaggtgggaggatcacttgagcccaagagttcaagactagcctaggcaacacacggagaattcatctctactaacaattaaaaaatggccgggtacagtggctcatgcctgtaatcccaacactttgggaggctgaggcgggtggatcacctgagctaaggagttcgagaccagcttggccaacatggtgaaaccctgtctctaataaaaataccaaaaaaaaaaaaaaaaaattagccaggcatggtggcgggcacctgtaatcccagctacttgggaggctgaggtagaagaatcatttgaacccaggaggcagaagttgcagtgagccaagatcgtaccactgcactccagcctgggcaacagagtgagacttcccctcaaaaaaaaaaaaaaaaaaaaaaaaaattaggctgggcacagtggctcacacctgtaatcccagcattttgggaggccaaggtgggcagatcacctgaggtctggagttcaagacccgcctggccaacatggtgaaaccccatctctactaaaaatacaaagaaattagccgggcgtggtggtgcacgcctgcaatcccagctactccaaaggctgaggcatgagaatcgcttgagcctgggaggtggaggttgcagtgagctgagaccgcgccactgcactccagcctaggcaacagaataagaccccatcacaaaataaataaataaataataaaaataaaaaagtcttgaaggacacaaaacagtttcttcttctggaaaaaggaaatagagaggtataagaagagggcatctcggccgggtgcggtggttcacgactgtaatcccatcactttaggaggccaaggcgggtcggattacaacgtcaggagttcgagacctcgatgtcaggagttcgagactagcctggccaatatggtgaaaccccacctccactagaaatacaaaaattagctgggcatggtggcacatgcctgtagtcccaactactcaggaggctgaggcaggagaatcgcttgaacccgggagacagaggttgcagtgagccgagattgcgccactgcattccagcctggcaacagaatgagactccatctcaaaaaaaaaaaaaaaaaaaaaaatacaaaaattagctgggcagtgtggcacgcacctgtagtcccagcggcttgggaggctgaggcaggagaatggcttgaacccaggaggcggaatttgcagtgagctgagatcgcgccactgcactccagcttgagcaacagagcaagactccatctcaaacaaacaaaaaagcactgggcgcagtggctcacgcctgtaatcccagcactttgggaggccgagacaggcggatcacaaggtcaggagatcaagaccatcgtggctaacgcggtgaaaccccatctctactaaaaatacaaaaagttagctgggcatggtggccggcgcctatagccccagctacttgggaggctgaggcaggagaatagtgtgaacccaggaggcagagcttgcagtgagccgagatcaccactgcactctagcctgggtgacagagcgagactccatctcaaaaaaaaaaaaaaaaaagagggcatctctttacttcatatactgctaggctatttaaagtgtttttatactgaaggtcatttacttttgtaatttaaaaaaacaataaagtaaatttttttttttttttgagacagattctcgctctgtggcccaggctggagtgcagtggcgcaatctcagctcactgcaagctccacctccagggtccacgccattctcctgcctcagtctcccgagtagctgggactacaggcacccgccaccacacctggctagttttttgttgttgttgttgttgttttgtatttttagtagagacagggtttcactgtgttagccaggatggtctcaatctcctgacctcgtgatccgcccacctcggcctcccaaagtgctgggattacaggcgtgagccaccgtgcacggccaatttttaaaagtcaaaataacatgagtaggtggttctctccagtaaattcagatgcctagaagcagaagtagagaaaatggcagcatgatacaaagcaacagaaaagtaaatgacaagccagacaattcaaagaaaacttcctggtttcttttttattttaaagtgacatttttttaaatttttttaattttttttttttttgagacaaggtcccgctctattacccaggctgaaattcagtggtgtgatgttggctcactgtaacctccacctccagggttcaagcgagtctcctgcctcagcacccccgagtagctaggaccacaggtgtgcaccaccacgcccagctaatttttatgtattttttctagagacggggttttgccacgttgcccaggctggtcccaaactcttggactcaagcgatctgcccagcttgcccttccaaagtgctgggattacaagcatgagccaccgcacctggcctaattcctggtttctaaacccaaatcctcacatctctctgctatattcttaattcattctccacccctcaggcagtttctatggtttatctcacaggaaaagagaaaagaaacattcctacaattcggccccaccttctttttttttttttgagacaagagtctcactctattgcccaggctggagtgcagtggcacaatctcagctcactgcaacctccacctcccgggttcacgccattctcctgcctcagcctcccgagtagctgggactacaggcacctgccaccactcccggctaattttttgtatttttagtagagatggggtttcaccttgttagccaggatggtcttgatctcctgacctcgtgatccccccgcctcggcctcccaaagtgctgggattacaggcgggagccaccacgcccggccaaggccccaccttctaataacatcaccatgagtgataggatttcaacatatgaattttggagggacatgaacattgattgacaccacagcaaatcaagttctacaaaacttagagatgcaaaatacaacatatgaaagccaattctggccaggcacagtggctcacacctgtaatccctgggccaatcacctgaggtcaggagtttgagaccagcccggccaacacggtgaaacccatctctactaaaaacacaaaaattagctgggtgtggtggtgcatgcctgtaaccccagctactcggaaggctgaaggaggagaactgcttgaacccagaagacgaaggttgcagtgagccaagattgcgccactgcactccagcctgggcaacagagattccatctcaaaaaaaaaaaaaaagcacacacaaaaaaaggcatttctagcttcctgatctaacacaaacccaacataggtttgtggaaaaactctccttcaatgtgtatctcattaatactaattataccaaaggttgcaaaaatattcagaatatataatactgattaataaatttataaattgattctcacctaatctgaccctgatttgctgtaattcttcaaattccctaagtcctaactctttttaacagtcttacagaagacttcttctgtagatatcctcaaaaacaggtaagagtctgggatagctggttgggctttctggaaaataagttgagtccctacattatccctttgtacataactaagttccagagatcaaaaatataaatatgaaaaaatgaaaccctaagtactagatgaaaacatggggaatcattttcataagctcagggtaaagaaatcttctataatatgaaacctaggggtcattaaataacaggttggataaattctaccatgtaggaacttccatatattaaagacacggcgggggcatggtggcttaagactgtaatcccagcactttgggaggcagaggcgagtggatcacgaggtcaggagttcaagaccagcctggccaagatggtgaaaccccttctctactaaaaatacaaaaaattagctgggcttggtggcaggtgcctataaccccagctactcaggaggctgaggcagtagaattgcttgaacccaggaagcagaggttgcagtgagctgagagtgcgccactgtactccagacttggcaaaagaacaagattccatctcaaaaaaaaaaaaaaaagaggctaggccaggcgtggtggctcacgcctgtaatcccagcactttgggaggccgaggcgggtggatcacaaggtcaggagatcgagaccatcctggctaacactgtgaaaccccgtctctactaaaaatacaaaaaattagccaggcatggtggcgggcgcctgtagtcccagctacgcgggaggctgaggcaggagaatggcgtgaacccgggaggcagagcttgcagtgagccgagatcgcgccactgcactccagcctgggtgacagagcgaaactccatctcaaaaaaaaaaaagaaaagaaaccctatctctactaaaaatacaataattagccgggtgtggtagcaggtgcctgtaatcccagctactgggtaagctaaggcaggagaatcacttgaatccgagaggcggaggttgtagtgagccgagactgtgccattgcactccagcctgggcaacagagcaagactccatctcaaaaaaaaaaaaaaaaaaaaaggaaaaaaagtctaaagtaagacccccccacaaaaataccaaacaaaatgggaaaaatatctcaaaacatgacaaagagctatcaactctgattccctcttgtttacctcctacagtccaagtgcccaagtcctaacaattctatctcctaaacatctcactaatctgtccaggcctctgtctccattgataccaacattctttcttacccagatataaatagctctttctttttaataacggtatacactgagcatggtggcacaggcctgtaatcacagctactcaggaggcaaaggcaggaagatcgcttgagcccaggagttagaggctgcagtgagatatgatggcaccacagaagaaatgcactccagcctgagtaacagagtaagacctcatttctaaataagtatttaaaaataaaaataaatgtacagttcaatgtgttgtgacaaatgtttacacctacgtatctaccctgccaatcaaaatacataacaattccatcaccccaagaagttctctcatgcccctttcctatcactccctgggaccaagagtcaacctctgttctgatttctatcaccctagcttacttctgactcttcccaaaattcacaaaaacagaattatactgtagcagtatatggcatgcttatttttctcaaaataatgtttgaggccgggcgcggtggctcacgcctgtaatcccagcactttgggaggccgaggcaggcgggtcacgaggtcaggagatcaagaccatcctggctaacacagtgaaaccccatctctactaaaaatacaaaaaattagccgggtatggtggcaggtgcctgtagtcccagctactcaggaggctaaggcaggagaatgaggggaacctgggaggcagagcttgcagtgagccgagatcgcgccactgcactctagcctgggcgacagagcgagactccgtcacacacacaaaaaaaaaaaagtttgaaattcacgttatgacatgtatcgtttgttcctttttatatatgtcaatttgttcattgtattatttgctataaaacgagttttacggccgggtgcagtggctcacgcctggaatcccagcactttgggtggccgaggcgggcagatcacaaggtcaggagatcgagaccatcctggctaacacggtgaaaccccgtctctactaaaaaatacaaaaacaaaattagccaggcatggtggtaggcgcctgtagtcccagctactcgggaggctgaggtgggagaatagtgtcaacccaggaggtggagcttgcagtgagccgagatcgcaccacggcactccagccttggtgacaaagcgagactccatctccaaaaaaaaaaaaaaaaaaaaaaaaaaagagttttaaaattttttatagccaggcacggtggctcacacctgtaatcccaacactttgggaggccaagacgggcagatcacctgaggtcgggagttcgagaccaggctggccaatacggcaaaacctcgtctctaccaaaaatacagacattagccaggtgtggtggcggggcgcctgtaatcccagctactcaggaggctgaggcagggagaattgcttgaacctgggaggtggaggttgcagtgggccaagatcacggcattgcactccagcctgggtgacagagtgagactctgtctcaaaaaaaaaaaaaaaaaaatgttttacatgtccctactagagcttctgatactacagcttctgagtttcttatcttgatttaaaatgtctttccatcccttggattgtacagtcatttaaatattattctgagactgttattgtttactttatatatttaagcttttaattcatttggaaatgattttggaaaatgatgagaatggtgttccaattctattttttgtcagatgtctcagttttatgagcaccacctattaaattaatcatctttttcttgcgatactaaaaattaccaagaggtagatatttaaccaggccactgacaatcacacagttatgtattcctaagtgaaagtacttatctcatgctcagagtgctctaggagatttatcttttgaaaaacaaaaacggtatcactctcctgcttttaaaactcttcaatagctttgtactgtccttaagataaagatcagatctggctcctgctaacctctccagtatcatctaacactatgctctcgctctcattactgtactccagacacactagccttcttccagttcctcaaactcagtgatctctcctgtcagtggtctttacagaagccttcatctccttgggaaacttactttattttctcccattaacccccacctagccttctcccacccatccctcagtctctacagatatcatttccccaggaagccttcccttgtcccattttcctaggccccatattgttcaaacctcgccaagagctctcccttacagcacttggcacacttggaaatagtaactattggcccgggtgtggtggctcacgcctgtaatcccagcactttgggaagccaagctgggcaggtcgcttaagctcagaagtttgagaccaggctgagcaacatggtgaaactccatctctacaaaaaatagaaaaattagccaggcatggtggtgcctgcctgtagtcccagatactttgaaggctgaggtgggaggatggcttaagcccaaagggtggaggctgcagtgaggtgtggtcatgccaccacactccagcctgggcaagagagccagaccctgtctcaaaaaagaaaaaaaaaagaaatagtaactatttgcttaatgtcatcttccctaatatcctgtaagagttccacaatgacaaggaccatttctactttgttcaccactatacgcctgtacatctcattaaccagctcaagaaatactagtcacaaataaaccagtaagaaaaatgaacacaacctatgcatcataggacagcaatgggaacgtcacagaagaaatgtaaaaagacaaatacagcaaaaagatgactgataccctaatggtttaagaaaaaaaaaataccagctgggcgcagtggctcacatctgtaatcccagaactttgggaggccgaagcaggtggaccacttgaagtcaggagttcgaggccagcctagccaacatggtgaaaccccatttctactaaaaatacaaaaattagccagttgtggtggtgggcgcctgtaatcccagctacttgggaggctgaggcaggagaactgcttgagcccagaaggcagaggttgcagtgagccaggatcgtgccactgcactccaacctgggcaacagagtgaaactccgtctcaaaaaaaaagaaagaaagaaagaaaagtaataaaattaggctgggcatggtggctcacgcctataatcccagcactttaggaagccaaggcaggaggatcactttagtccagcagttcgagaccagcctgggcaacatagtgacctcatctctattaattaagtaaatataatttaaaaatgttttaaaagatattttcctagtgtgagattataaaaattttttttaaaaaggtcactactggttaaaaagaactagtataggctgagtgcggtggctcaggcctgtaatcccagcactttgggaggctgaggcaggcgggtcacctgaggtcagaagttcaagaccagcctgggcaacaaggtgaagctccatctctactaaaaatacaaaaacaaaattatccaggcgtggtggcaggcacctgtaatcccagctacttgggaggctgaggcaagagaatcacttgaactcaggaggcagaggttgcagtgagctgagactgtcgctgcactcccgcctgggtaacagaaagaattggtataatcttttaaaagatagctaatatctttgaccaagcaattccacttcaaggaatttattctacaggaacactataaaaacacacaaagatatatgcacacatctttctctgcaatactgtttccaatagggaaaaaataggaaacactccaaatagccataattcggtggtttcttaagctacaggactcactctgtcacccaagctggagtacagtggccagtggtgcaatcacagctcactgtaacttcaagttcctgggctcaagccttccttccattttagcctcccaagtagctgggatcacaggtatgcgccaccacatctggctaactttattttttgtagaaacagggtctcactatgttgcacaggctggtcttgaacttctggcctcaagcaatcctccagcttcagcttcccaaagcactgagtttatggtgtgagccaccatgcctggctcataattgggttttaagtaaattatcatttagccctacaatactatactgattatgaaaaggtatctaagatacattaagcttaataaaacaagttgcatttctgtacaaacactactaattctctcaaaatgaaaagctttaaaaactaagtataaatgtttagaaaattctaaaacaaatataccaaagagtggttatccctgggaattgccatctcttttctaatttaccattcacacagtatttgattaactgtgggtatatattacttttggaattagtgggaaaatgcatttctttttaagtgtcatctaaactgaaagctgatttttacaatagcaaaagttcccaatttataaacttcggacagataaccaaaactaatggtcagtaaaaatgacattcacttcaagttgatagttactgtattaattcctaaacatactgtaccccttgatgaacaatttcaatcaataaaacaaatataaagtattaggtcaaaactctatttaatagccaaatacttaagacatttgattaatacctctttttttttttttttttgagacggagtttccctcttgttgcccaggctggagtgcaatggcgcgatctcggctcactgcaatctccgcctcttcagttcaagagattctcctacctcagcctcccgagtagctgggattacatgcatgtgccaccatgcccagctaattttgtatttttagtggagacagggtttctccatgttggtcacgctggtctcaaactcctgacctcagatgatctgcctgcctcggcctcccaaagtgctggtattacaggcatgagccaccgcgcttggcctgacacttcttaaatttgtttttataaattagttaaaagcattggtggttcaatggtagaattctcgcctcccacgcaggagacccaggttcgattcctggccaatgcagctcccaccttaatcccagctattcaggaggctgaggcaggagaatcccttgaactcaggaggcagaggtgcaatgagctgagattgtgccattgcactccaccctgggcgacaagagcaagacttcttctcaaaaaaaaaaagaaaaacaaattagttctaacagtataccatgtacaaaataatataacatttgaatgcagtcaccctgaaattcctgattgattaacaattcacattttttagtatgttctccctaatgatacctcattctataatcaaagctggtactaaaaaatacttttcattctgatagaaaataatctaagcaaggccgggcgcggtggctcacgcctgttatcccagcactttgggaggccgaggtgggcggatcacgaggtcaggagatcgagaccatcctgattaacaaggtaaaaccccgtctctattaaaaatacaaaaattagccgggtatgatggcgggcgcctgtagtcctagctactctggaggctgaggcaggagaatggcgtgaacccaggaggcgaagcttgcagtgagccaagatcgcgccactgcgctccagcctggccaacagaacgagactccgtctcaaaaaaaaaaaaagaaaatcatctaagtatactttcaaaacaaaacctactctgcaattgccagggttttctgtatctctccaagattgggaaactaaagagttaacattatttaacagttttggtactaggcactgagttgtaccacttggtgccctctatctacagagactaagacaaactacacaaacagcagtgaggagaaccaacatttcaactagggactgagagatgagtttagttttgacttaaaaggtttctccccttttcatgctgctttgaatttctcaaatgaagaaacgaattaacagctatctgaacaggtaataaaatatacccactgcattcacatattccatggatggaagtttaaattgtaaattttttggaaagcaatcatactctacaatcaaaaattttaacactgtgcatgctatttgacttggtctttccaattctagaaattgaagttaaataatcaaaaatatgttcagaagatatacataattcttacagcatttttctattaggaaaaacttaaacatcctttttcttttttttttcccccccgagatggagtctggctctgtcacctaggctggagtgcagtggcacgatctcagctcactgcaacctccgcctcccgggttcaagtgattctcctgcctcagcctcctgagtaactgggattacaggcacctgccaccacacccagctgatttttttatttttagcagagacagagtttcgccatgttggccaggctggtcttgaactcctgacctcaggtgatccacttgcctcagcctcccaaagtgtggattacaggcatgagccatcgcaaccaggcaaaaaaagttaaacatcttataacatgagtttagttactttgtgttatgatatgaccacatgaaaaatgacaattttttttttttgtttgagatggagtttcgctcgttaccccaggctggagtgcaatggcacaatctcagctcaatgtaacctctgcctcctgggctcaagcaattctcctgcctcaggctcctgagtagctgggattacaggcacccaccaccatgcctggctaatttttgtatttttagtagaaatggggtttctccatgttggttaggctggtctcgaactcccaacctcaggtgacccacctacctcagccttccaaagtcctgggattacaggtataagctaccgtgcccagctgaaaaatgacagtattttttaaaaagtaaatatacaacagcccatttgtctcaccccactaaaactaaacatattgaaagcaaagactttgttttattcactgcctcattcccagcactcagaacaatgcctggcacataatagtcactcaaaaacttgcaaagcagaccgggagtggtggcttacatctgtaatcccagcattttgggaggcagaggcaggaggatcacctgaggtcaggagttcgagaccagcatggctaacatggtgaaactctgtctctactaaaaatacaataattagctggacttggtggcaggcgcctataatcccagctacttgggagactgaggcacaagaatcgctttaacccgggggggcagaggttgcagtgagccaagctcacaccacttcactccagcctgggcgacaagagtgagactgtctccaaaaaaaaaaaaggttgtcaaatgaatgaatttgagtaatgcaagtgaatacagaagaggttttagctagaaatatatatgtaataggatcacataacatatacatttaccttacccgaattcaaccgtccagactaagcaaaagaaagaaattatgtaaatcatcatgctgacctgccctgcagtgacagtggagaaaaaaccagaatctgctattccctctgggagtctcaggtccccacagctctcacatggtatcacactagctacatgtgattctagttttttttttttttttttttaagagacgatcttgctctgttgtccaggcaggacttcagtggcaggatcacagctcactgcagccttgaactcctgtgctcaagcgatcttcctgcctcagcctcctgagtagcaagaattacaggctcaagccaccacacccagcctgattcttgcatttgaaggattttttaacataatatggccctaaatataagccagctacttcatctggtgctacacccagaaaacagcaattttctccaatgctgagatctgaaaaggatttccaagagtaattttgactatacagaaattttgccttagtgattgactttagaacctacttcccattccaaataaaatgcaactctactgcatgccatagcatacacaaatatatctataacctataatcatagatataactgggtgatgaacatgcatagtgaccttgtttttaatttattttctaatattttttcaatttacaaatattgctttcataagaagaaaaagcactatgtaggccatgtgtggtggctcacatctgtaatcccagcactttgagaggctgaggcagaaggatcccttgagcccaggagttcaagactagcctgagcaacacagagggaccctatctctacaaaataaaaaaaatgtttttttaaaaaaagaacttctatttaggcggggcgcagtggctcacgcctgtaatcccagtactttgggaggccaaggtgggaggatgacttgaggtcaggagttcgagacaagcctggccaacatggtgaaactccatctctatgaaaaacacacacacacaaaattagctgggcatggtggtgcacacctatagtcctagctactcgggaggctgaggcaggagaatcgcttaaacccgggaggtagcagttgcagtgagccgagatcaagccactgcactgcagcccaagagacagagtgagactccatcaaaaaaaaaaaaagctctatttttaattgtcctttcaacattcatcagagaatgctagatctggtatcaacagtcctctacttcacctaaaacaatgctacacctatagtgtattatcaattgttaataaacttactcatgcagcaaattctttcagcctattactctgttctgttttaaacaatttcttaattcagaaacatgtaactcaagctatgcatcttttcaacaagaattaaggtcatttttatttctattaagagtcacttaaatctgtatgaaattaaaaaaaatttattttaatttttaaaaattttcaaaataaggtacctgaacatcatagagtgctacaatattttcatgctgaagttcctattaagaaaattgagaatgaaaaatatgtaagtattctaatgactttactatattttaatatgtaaataaaattaaagtatacacatacacttctagtattatacttatattaagactataaaaattcaattaaagaataagaaatgtgcctgatcaaacaaaaagcacattatctcactgaaagaaaatatgatttttagctcaaagagctacaattcttaaaaaagagctctccacaggaagcagttttgaggaaatcgggtgttaaatgagggttccacgcttgtattagtttggaaaacaccaggttaagtactttgaaacaagtttcttcattgtagaatttttcagactttctttaatgagccataggctttgtgactctccaagaagtatttagtaaatggggttttccaaacgtactcaaccatcttctcaaaccatcccacttagataacactggttgtgagtgatctaaaaaggccacctccaaggaatataactttcttcaatttaaagaaagaccccaagcacccctactccccccaaaaaacttagtagtaacatgaaaggggacaacaggagaggtaaaaacaatgtacaagatgggtctgcctggccctcttctcaaacaacaacacagtcactaggaaaaagagaaatgatgagaagctaaactcagtcttcacagaatccctctgagctttggttcttaaaaatagcttccgagtactcaatgttttaaaaaagtgagcatgcaaaaaggagagcaacagttgaaaattctcaaacttggacccaactaccaaaattgaaaaggatggcagcatgtattcatttaaattaagttttaaccttatatgaatactactacataaagtaacatacctttaagattttaatttcctttccaagcagtatttgtgattttgacaagttctttttattaatacttttaatagctacctcccaatcagttttctgaaaaggaaaaacagtgttactcctagataccattccacataaataacagaaaaaaatttacaagcgcgaaggtgtttttggcaaataaatgtacggcattggggaaaaatggaattattttcaataattggaaagtgatttcataaattatagtgcaatatgccaagatcctacaacacaacttctaaaaataacaaatatgaagtccacatggtaactaacattaaatgaaaaaagaacagttcacaaccacttcaaagttatggacaaatgtagaaataaacttggaaggtgatacagttaattgaaaagttatttgttagcttggaaggattacaccgtgcttgagttctaaattattttcctaataaatgaaaagtaggccgggagccgtggctcacacctgtaatcccagcactttgggaggctgaggcgggcagatcggatcacctgaggtcaggagttcaagaccacactggccaacgtggtgaaaccccatctctactaaaaatacaaaaaaaaaaaaattaggcgggcgtggtggcgggcacctgtaatcccagctactcaggaggctgaggcaggagaatcgcttgagcccgggaggcagcggttgcagtgagcggagatctcgccacggcactccagcctcggcgacaaagcgagactctgtctcaaaaataaataaataaataaataagaaaagtagcattacttcatccgataagcaacaaagtcagcccacttttaacacgccccttgggcaacaatcagaactgccacaccctttaagattatttccactcccgatatgcctttccaaattctttagattctaaaacctcgtgtaactgtacttgcgaaacagcaaaggcttaaaacaatttttttaaggcttaaaggtgatttcatgttcaaggtgattgaaaatgaattgtccaaccacctttctcacccggagctcgtctatctgactccgggggggaaaacggtacgggggctcttcggggtgcaggggaccagtgctgggaaaggtgacacctcccaggctgcgaaagcctgaggctaatgggacatccgcccattttccgctgggtctgtaattatcaacctcaaaagtgaccagccctgggcacggggaaaaaaaccaaaggtccattcacgcccaaccctcgagtctgcacggtgcagtaccgtctattttgggtccagggtaacctgggtgcaaacgctcctgcgggcggaccgcggggtgggccccgggcacacaggaggatcagcagcagccggtcggtaggcggagcgctgccagaggcttgggcctcacaacaaccctcacaggaccaaaacaaacggcgagacgggctgcgcgcacaatagcatacccgggcggctagccgagtcgggggtctcggctcgcggctgcgccaagtttcagaaccacctagccccgtgcctgccgcccggggcccggcctcgccccggccggcgctcacctggcggtgccgcccccggaagaccacggcgaaggccccgtgtcccacgagatccctcttgctgtactcgaagtcacccaccacctccatggccgcgcccccggggcacacagcggacgggcgggcggcgcagtgcggcgcaggtatcagcaccgcggctccgcgggcccggagcgcgccagcgtgcggcgggtctggggcagccgcagccccgggcccgggcggactctcatgccgagagaccggagcggaaactggggaagctgccgcgcggagccagggtcagcgaggcccggcccggcccctgccgctcatggcccggcctgccgccggccgctggctgtctggcgaagcggcctcggcgctgccgggccaggggtgccgtcaccgtcactgtgcgcgcccagagccgcacacgcgctctgaggcagtgaggggcccggtactctccatccccagctcgtcgggcctcctcggccctccccgctcggggcgctgctgcgacggcgacggccgccgccctagaacccgcaccgccgcggccccgcgcttccccgcctcgcggcggcgcccaacgccctcgcgcgcgctacccgctcccgcgcgactggctgccctccgcgacgtccgcgcgccttgaaggccgcagcgccagccggctccctccgccggggaaaggagtgcggccagggcttggcgcccgcagctgggcagatcctcggccgctcctgaggcggggacgaagggcgcgacccgctgcggccacagcgggttacgggctgcgggctccgttctgggcctggggagcagattcgagccgaccacgccccgggctccaggccgctgggaggcggacttcagagaagcgggtcttgaaccccagctgcaggcaggacgggattatctgcgcagggtagacccccagattcctgccagagcaaaggagcaactgctactccaggctttgcccgcgctctggaaaaccagagttcacgctgccaaactgccagccttcggacgcctctcggggtttactcgcttaggatccctagagggacggtgacaggcgggattctgcaccttttgggggtcccttgactgcgagaagctggtgacagctcagggccctcttcgcagagaatcgtttctgcacaccgactcagaatcgcacacgttttcaaggttctcctgggagctcctagtgtcaggctagtttgacctcgggcttacttcacatggccgaagggagctttcttttctacctgattgttaaagctgtccaagtgacaaggaacagattgtcaggtttcccgcaaagaagtgtcttatgaaaccatttaataaacaatatgcttgaaactaccatggaatacgcaggctccacacttgagtgtgtgttcggttgtatagggtatgtgcttttggggtctgtcaccacctcgactgccactgcctgtccctgcaagctgatctctgaaccatgacagagtcagctccaggattctgagagaacgctccttcctcacacgctcaaaacgtagggccttgagtttctgcttctgctactgtgcacgcttacgttatcctgtccttacttacatctggcccaggtggttgtgttagacactgaaaatctggagccttcaaaagttgacagcaacttaagcaagtttgcacatacacccaaaaatggatggagatgattccttacctcactgaaagattctctacagtctatttttttgtttacttttttttttttttttttttttgagacagaatcttactctgtcacccaggctggagtgcggtagcacaatcttggttcactgcaacctctgcctcccaagtgcaagtgattctgctgcctgagcctcccaagcagctagaattacaggcacgcaccaccacgcccagctaatttttgtatcttagtagagatggggtttcaccatgttggccaggctggtctcaaactcccaacttcaagggatcagcctgtctcggcctctcaaagtgctgggattacaggcgtgagccaccacgcccggcctgttttttgttttgagacagagtcttgctctgttgcccaggctggagtgcaatggcatgatctcggcccactgcagcctccgcctcctgggttcaagtgattctcctgcctcagcctcccaagtatctgggattgcagacctgcaccaccatgcccggctaatttttttttttttagtagaggtggggtttcaccatgttggctaggctggtctcaaaactcccaacttcaagcgatccgcccacttcggcctcccaaagtgctgggattataggtgtgagccacctcacctagccacatgaaggttttttgtttgtttgtttgtttgttttgagacggagtcttgctctgtcgcccagactggagtgcagtggcacgatctcagctcactgcaagctctgcctcccgggttcacgccattctcctgcctcagcctccggagtaactgggactacaggcacccgccaccacgcccggttaattttttgtatgtttttagtagagacggggtttcaccgtgttagccaggacagtctccatctcctgacctcgtgatccgcccacctcggcctaccaaagtgctgggattacaggcgtgagccactgcgcccggccacatgaaggtatttttcagaaacctccaataggcccttcgtttggacatgcgtgtcctgtattcacaggccaaacatgggccccatggacatatccatttgaaaagcaaaatgtgcaggatttctgacctcaagagtcagaaaagaagtgggggcaggaggcagggggtgctttgctaaaaaatgtttagttaggactatgttggtagcaaatagcaaacgtcaaatgtgataaagtgaaaaataaagaatgtagataaagatacaggtgtgcttctcagagttcaaagttgggcttcaaaagcaaactacccgcagaaccaggatctcaaagagaactgccttccgtctgtgcccctgctttgttctcttgcctgagatctcctacatggtggcaatggcagccccagtctccaaaccaaattttttttttttttgagacgaagtcttgctctgtcgcccagggtggagtacagtgttacgatctcggctcaccgcaacctccgccttccaggttcaagcgattctcctgcctcagcctcccaagtagctgggattacagttgcgtgccactgcacctagctaaaattttttttgcttttttagtagaggcggggtttcaccatgttggccaggctgatcttgaacccctgaccttaggtaacccgcctgcctcggcctcccaaagtgctaagattacaggcgtgagccactgggcccagccaccaaattcttaaggaggggattctgatcaacctaacttcagctgggtgctgggccctgaacaatcatcggaagccaggaatgggactgaggaaggcaggatcatgtaactatggctgcccccaacacaagcctgtgggtgttctgagtccccagaagcaggggccacataggcaccccaggaagtgttcaccctaggtcaaatttaggcttcatttgagaatggaggccagggcagatttctagtttacctctaaaatcactggaaattgccaatttgattcatgttcattgttcttaatttgtcctgtgtgtgcatatgcatgtgtgtctaaacatgcttaactgttgaaatgtttcaataccagttagtaaatagaaaaacagtaactgcaatgagaggtaaaattaattactaatataggccaggcacaggggctcacgcctataatcccagcactttgggagactgaggtgggtggatcacctgaggtcaggagttccagaccagcctggccaacatggtgaaaccccatctctactaaaagtacaaaaagtagccgagcgtggtggtgtgtgcctgtaatcccagctactcgggaggctaaggcaggagaatcacttgaacctaggaggcggaggttgcagtgaaccaagattgcaccattgcactccagcttggatgagaggagcaaaaatccatctcacacacatgcacacacacacacacacacacacacacacacacacacactagccaggtgtggtgacattcgcctgtaatcctagctactcgggaggctgaggcaggaaagttgcttgaacccgggaggcagaggttgtggtgaaccgggatcgcaccactgcactccagcctaggtgacaaatgagacactgtcttaaaaaaaaattaattactaatataaattctaatataaactgtttagtttatcatccagtgctatagaaatgttctgatgataaaaggtatcctgtgaaaataaatgtgagaaatattctgctgggcagggaggcattccaagatgcaggagaatagccagtttattattatcttcaaattacatcattgctattccttctattttggttctattgtttctactttgatgacattgctgatgctttgaaattcttgtgaatagttagggtgcagtgctttgatatttataaatgcaagaatttacaataaaatacgaaaaataagcacaaaaaaggaagcaataacaaatttttagtatgttttttaaagttttaaaaaataccataatgacaaatcttctgaataataaatgtaaattttctgaaatgatatcagtaacaaagttcagcctaggaatattttgatgcaatgcaaaaaacaaacaaacaaacaaaaacagcagggagcatctttttatattgtgcaaaaatcagtataaaatttggccaggcgcggtggctcacgcctgcaatcccagcactttgagaggccgaggcgggcagatcacaaggtcaggagatcaagaccatcctggctaacatggtgaaaccccatctctactaaaaatacaaaaaactagctgggcatggtggtgggcgcctgtagtctcagctactccagaggctgaggtaggagaatggcgtggacccgggaggcagagcttgcagtgagctgagatcatgccactgcactccagcctgggcaacacagcgagactctgtctcaaaaaaaaaaaaatcagtataaaatttgcatctcaggtcgggctcagtggctcatgcctgtaatcccagcactttgagaggctgaggcaggcagatcacgaggtcaggagatcgagaccatcctggctagcacggtgaaacctagtctctactaaaaatacaaaaaattagctgggcgtggtggcgggcacctgcagtcccagctgctagggaggctgaggcaggagaatggcgtgaacctgggaggcggagcttgcagtgagccaagatcgcgccactgtactccagcctgagcgacagagtgagactccatctcaaaaaaaaaaaaaaaaaaaaaaaaatttgcatttcaggccaggcacagtggcccaagactgtaactccagcattttaggagaatgaggcaggcagattgcttgagctcaggagttcaagaccagtctgggcaacataggaaaacctcttctctacaaaaaataaaacaattgaccaggccgggcacggtggctcacacctgtaatcccagcattttgggattacaggcattttgggatcatggctgaaaatgctctattctttctaaaccgtacagtagattctgttgacattttgaagtgcttccagatagctgaacaggtggaggttcctggagggtgctgcgcctggagaggacatagaagctccatgtcccttcccacatgatcacttgaggtcaggagtttgagatcagccttgccaacatggtgaaaccagaagaagacgactctaacattgcttggggttgcaaagttttctggaagaaagtcatgttggagaaaagtcttgaaagatgtatcagagcctgccaagtaggaaaggtgagtgaaaggagcgtgttcaaaatgtggcattgtgggaaccagtgggctgtttggcatagcaagaatgtaaggtacatggttggatgggttggatagaatagtgggagatggggctgggaagttaggttgggaccttatccaggaaggtgctagaggccccgccaactcctacttccagcctgtctgataaggtcatgtccaaaaggactatgaaaggggatcgagaagaagctgggttccccaattctgttcagcacactgttgtccacagctcttacttcctcatctgggcactggtgagcatgtgtcttaggtgaacagatgcacaggtcaaggcatgtgggaaggggcatggagcttctatgtcctctccaggcacagcaccctccaggaacctcccctgttccgctatctggaagcacttcaaaaatgtcagcagaatctactgtatggtttagaaagaatagagcattttcagccatgatggatttactagaacttcaaaaaagaataagactggccaggcacagtggctcatgcctataatcccagcactttgggaggccgaggtgggtggatcacttgagatcgggagtttgagaccagcctggccaacatgatgaaaccctgtctctgctgaaaatacaaaaattagccaggtgtggtggcacacacctgtaatctcagctactcaggaggctgaggggggagaatcacttgaactcaggatgcagaggttgtagtgagccaagatggcaccattgcactccagcctgggcgacacagcgagacttggtctcagaaaaaaaaaaaaaaaaaagaaagaaaaaaggaatgagaccaatgtagatgtgccattgcaatctagatttgagctccctcttacgaagcaaagacccactgaaatgacaaaacaactgtccttggttgcgttctctgcaaagagatgctgacctggacttgaggtacagatgattattagggattaacaccagggggagaaaaatgggggctggaagcagaacgggacagaagaggaagaactgtgatgcaggctcgaccatgcctaacctcctcagcagaaagctctggagcagaacatcagagttgtcccgcattgagccaaaatgtcacgcctcactcagcaacctggtggggccacccaggcccctgacagggcggtgaggctgctctgctgctgaggccaggaggagttgactgctggacgtttactgtgctaccacagcctcgcagcatgttcgtcctccagggaaggtctgggcagcatgtccccaaggctactgcaacaactttcgggaacacttggaagtcaagccgtaattttctaccattatcaatgccacatctattatttcatattaaaatattttaataatgtacttaaatgcaaattttaagactttaaagattatttagtgtgtcctgtgaattatgtggaactggcagaaaaaatatctgaaagcatctattaaattttttttttcctgtgactcggcccggcgtgtaatcacagcacttgggaggctgaggtgggtggatcacctgagaccaggagttcaagaccagcctgaccaacatagtgaagccctatctctactaaaaatacaaaaattagctgggtgtggtagcgaatgcctgtaatcccatctacttgggaggctgaggtgggagaatcacttgaacccggtaggcggaggttacagtcagccgaaatcaccccactgcacttcagcctgggagaaagagcaagactcagtctcaaaaaaaaaaaaggaatccatcctgatttagaaagtttaataaaaacataaaaactgtaacatgggagtggctaaataataaataaatgaaactttttaagggtctggttttaataaatgatttataatagaaaattcaattttttctctcttttttttttccaggaggctgaggcatgagaatcgtttgaacccaggagacagagggccaccaggcccagctgattttttttttgtctttctagtagagacggcagtttcgccatgttggccaggctggtctcaaacttctgacctcaggtgatccacccaccttggcctcccacagtactgggattacaggcatgaggcactgtgcccggccaaaaatttctctctcttttttttaaatcaggttatcactctgttacccaggccggagggcagtgagtggtacaatcacagctcactgcagtcttgacctcctgagctcaagcaatcctcccaccttgggtagctggaagcacagacatgagccgctgtgctgggctactttaaaaaatttttttagagatggggtctcacttgttgcccaggctggtctcaaacttctgggctcaagggatactcctgcctcaaattgctgagcttacaggtgtgagccaccacacctggccaatttctgtttttaatttctgatacattatgcatatgtcaataggtctagcctacataaaccaaagctctttgggattctcaaaacattttcagggtgtgaagggtttctgagatgaaaggtttgagaactgctccactagtccaagctcaagctagtgccgtaagaggccaggcttcatctacactgtgctgtttgcagtaaagtaggttcagttccaaattgtgccacatcctggctgtaggaccttaggctttccttcacctctctgggcctctgtgccatctgtagaaatggagatgatgatgtttagtgactgctggtggcagacagagatagagacaagttcactgacttgtgaaacattggtgggacagtcaggaggtcctgatgatgtattatgaagatgagagtaaagagttggtggccggcggcagtggctcactcctgtaatcccagcactttgggaggccaaggcggatgcatcacctgaggtcaggagttcaagatcagcctggccaacatggtgaaaccccgtctctactaaaaataccaaaattacctgggcgtggtggcacgcgcctgtaatcccagctacttaggagactgaggcaggagaatcggttgaacccgggaggcagaggttgcaggagccgagaccgtgccattgcactccagtctgggcaacaaaagggaaactctgtctcaaaaataaataaatagataaaaataaagcattgatttttctgatttattacaaagacagacctatctcttgatattactcccaaggctattctttccgtgcagcccctgcagccctcagttcctccttggaggagtctataatcaggaggactgatttctggctgttgtgtaattgctaacactgggaaactaatatttccctttttctccctaccgtggtgagaattgctgagctgatatcttcccccaactcaagaggaagtgaacgccctgccctgcgcagggggcccgaagccatctcctctgcctctcggggatgtggtagggatcttgcccgaggtcaaccacacggcacacacatgcccacatgccacgcctctcagggacgaagctcttggaggctgccagccttcttcaaaggaaggaagaagcaaaacccaccagcaacaagaactaaaactgtgtgtgtgatctcagtgcagacatagcagagacatcagtagaaccctgagaccagtagaacccacagcccacagcgctgtgccttgatagcgagggggtcaccctgagaagctgcagcccatgtcctccctaaggcttcacaacgggttgcctgctctagagaaaccacctcagttgggatgcagaacttggcctggcaggtccatgaacctgatttcatgagcacccagagatcagggtgagagtctctctcaagaggagttcacatgaatcacaatcctagaggctgtgacatatatcccagaagccgaatgtattgatttgtgagggaaagtttcagctgttaaaaactaaaccagaaaaagcatttgacaaaatccaacattcatttctgattaaaggtgaacttctcccaactttgacatctgtccaaacccatagtacgtctatcaccaagagaaaacactaatgtaaaaaccctcctgtaaacggtggacttcaggtgattagagtgtgccagtgtagcctgatggattgtgaccaatgcagcactctgatgggggatgttgacagtggggaagactgtgcatgcagtgggggcagggagtgtgtgggaacttgctgtactttctgctcaattttgctgtgaacctaaaactgctttaaaaagtaaagtcctaaaaaatgctcagcaccactaattatcagcaaaatgcacattaaaaccacaatgagatatcatctcacaccagtcagaatggctattattaaacggacaaaaaataacagatgttggtgaggctgcagagagaagggaactcttatatgccgttggtaggaatgtaaattagtacagcctctgtggaaaacgatgtgaagatctctcacaaactgaaaatagaaccataatgtcattcaatccagcagtccctctatgggtatctacccaaacgaaaagaaattagtgtatcaaagggatacttgcacttgtatgtttatcgcagcattattcacaatagcaaagatacaaaatcaacctaagtgtccatcaacaggtgaatgaataaagaaagtgtggtgcatatacacaatggaatatcattcagccattagaagaatgaaattattggccgggtgcggtggctcacgcctgtaatcccaacactttgggaggctgaggagggcggatcatgaggtcaggagttcgagaccagcctgaccaacatggtgaaacctcatctttactaaaaatacaagaacaattcaccaggcatggtggtgcatgcctgtaatcccagctactcaggagactgaggcaggagaatcacttgaacccaggaggcagaggttgccgtgagcaaagatcgagccactgcactccagcttgggtgacagagggagactccgtctcaaaaaaaaaaaaatgaaattatgtttttggcagcatcatgggtagaaatggaggtcagtcattatcttaagtgaaacaagacaggtacagaaaataaaatactgcatgttctcactcataagtgggtactaagaaatgtgtgcacatggacgtagagtagaatgctagacaatggagactcagaagggtgaggagctgcgagggggaggggtggatgataagaaattagttaaagggtgcaatgtacctgatgggtgcactaaaagccctgacttgaccactggggaatctatgcatgcaacaaaattgcacgtgtacccaatacatttgtacaaatcgaaataaaagtaactaaaaagataaaaataaagtctttaaaaggaaaagagtaacccagattatgttgttctttgttaaaaaccctacaaagtcctctcatccaatcaaaggaaagtccttaacaataacctgcaagacccttcaccatctggcctgtttcccatgtgtccacatctcatgtcaccttcccccagtttgcctggcctcctgcttcagggctcctaaacatgctgtttcttcctctgggaatgctctcactctatctgcaaggatcacgccctcacttccttcaggtctttactgagatgtcacctgctcagtgaggctatccctggcctccttttgtcaagttgtattcctccctctacaattcctatctccctttccaggtttcattttctccttcgtacccatcaccagctaacatcctacctagtttgtttgtttgatggtcagcttcctccactagagaatacatttcttgagaacaggggttttgtcagttatttctattattattttaatatatatattaaaattgtaaatatgaatataaaatacatatattatatatatgtatatgtatttcagagagagggtctcactctgttgcccaggctctgaactcaagtgatcctactgccttctcctcccaaagggtgccaggattacaggctcaagccactgcacctggctactttgtcaattttgttcactcctaaatacttgttgaatgaatgaatagatgaactgtctggtgggctaaaatgctggtaacagtaagtagctcctcacataccctcagctctgcaaagccacctgggaagccatagattcaggggtactgagtaagctggaatctgagcccagggtgtctgctgacctcgggcaatgccgttgaaggcatcacccttggcaaggcaatactctctctccccatattgtctccttgactctgccttttcattcttccagggctctcagcccctttctgattagtacactctttactcccccacctccctcttttcccccttgcttcctttcatttttttcttcctttctttcgaaagggtcccactctgttgcccaggctagagtacagtggtgtgatcatagctcactgcagcctccaactgctaggctcaagcaatcctcccacctcagcctcccaaaacactggaatgacaggtgtgcgacaccgcatctgaccagcacactctttctttctttcttttttttgagacagagtctcactgtcttgcccaggctggagtgcgctggcatgatattggctcactgcaacctctgcctcctgggttcaagcaattctcccgcctcagcctcccgagtaactaggattacaggcatgtgccaccacacccagctaatttttgtatttttagcagagacggggttttgccatgttggccaggctggtcttgaacccctgaccacctgtctcgggctcccaaggtgctaagattataggcgtgagccaccgtgcctgggccacactctttattaagatatgctcaatttaaaaatcttgctgctagctaagcacagtggctcacgcctgtaatcccagcactttgggaggctgaggtgggtggattgcttgaggccaggagttcaaaaccagcctggccaacatggtgaaaccccatctctactaaaaatacaaaaaattagctgagcatggtggtgcacatctgtaatctcagctactcgggaggctgaggcacgagaatagcttgaatctgggaggcagagattgcagtgagctgtgatcacaccactgcactccagcctgagtgacagagcaagactctgcctcaacaaaaaagaaaaaaaaaaagctcttgctgacttggcattaatattatttctctaagacatctcacataacctctgctgtgagttattttttgctgatcttgaactctgactgtcagagccaacctcctatccacgtagctctcctgggaaacatctattatccatgcctccatcatgataatctcagtgtctgacctagcaccattaaaaaaatttaatggctcacagctgtaatcccagcactttgggaggctgaagtgggtggatcaccggtgaggtcaggagttcgagaccagcctgaccaacatggtgaaaccctgtctctactaaatacaaaaaattagctgggagtggtgatgcatgcctgtaataccagctacttgggaggctgaggcagaagaatctcttgaacctgggaggtggaggttgcagtgagccaagattgtccagcctggacaataagagcaaaactccatctcggaaaaaaaaaaaattttggccaggcgcggtggctcacgtctgtaatcccagcactttgggagagcgaggcagttggatcacataaggtcaggagttccagaccagcctgaccaatatggtgaaaccctgtctctactaaaaatacaaaaattggctggccatggtggcgggtgcctgtaatcccagatactcgggaagctgaggcaggagaatcattggaacccaggaggcggagcttgcagtgagctgagatcgtgccactgcactccagcttgggcaacagtgtaagactctgtctcaaaaaacaaacaaaaaaaaattagctaggtatggtggcaggtgcctgaaatcccagctacttgggaggctgaggcaggagaactgcttgaacctaggaggcggaggttgtagtgagccgagatcatgccattgcactccagcctgggcaacaagagcaaaactccaactaaaaaaaaaaatttttttagagacagggtcttgctctgtcacccaggctgaagtacactgacgcgatcatagcttattgcatccttgagctactgggctcaagtgatcctgccatctcagcttcccaaaatgctgagagcaactctggcaactaaacaagctgtggcctcaaataagcaatgttaaaacagtgacaactcatccagctcacagatgctgactaactgaacccttgctccgctagccatagctacagctttgattggtcaagaaactgatttaagtaactttctccggataagaagtccacatttgggaggccaaggtgggcggatcacttgaggtcaggagttcgagaccagcctgatcaatatggtaaaaccctgtctctactaaaaaaatacaaaaattggcggatcatgaggtcaggagatcgagaccatcctggctaacacggtgaaaccccgtctctactaaaaatacaaaaaaaaaaaaaattagccaggcgtggtggcaggtgcctgtagtccccactactcaggaggctgaggcaggagaatggcgtgaaccccggaggcagagcttgcagtgagccaagatcgcaccactgcactctagcctgggtgacagagcaagactccgtctaaaaacaaaaaatacaaaaaaacaaaaaataaaattaaaaaatacaaaaattagccgggcgtggtggcaagcacctgtaatcgcagctactcaggaggctgaggcagcagtatcgcttgaacccgggaggtggagattgcagtgagcagggatagcgccactgcattccagcctaggcggcagagtgagactccatctcaaaaaaaaaaaaagaccactgattatggactggctcttgtgggtttacagaggtttcgtattttcatgacttcgggtcctgaaaagatcttttgacatatagggcctaaccgtaatacatttaaatgttaaatctctacccagaagtgaacatgggttatatgttacatgtatgtttgctcaatacacatcaggactgccttcatgaatattcatagcatagctcctcctataacatgttgaatatgtatgcttagccaacatgtccagcataacttcctaccctaacccctcctcctctgaagtgcctatctctagtcttggtcagaggcacgctttccagcctgtgggatggtcaccttgggggctgtaacccttttataaagaatcaagtctcggccgggcgcggttgctcacgcctgtaatcccagcactttgggaggccgaggcaggtggatcacgaggtcaggagatcgagtccatcctggctaaccctgtctctactaaaaaaatacaaaaaaagtagccgggcgtagtggcgggcgcctgtagtcccagctactcgggaggctgaggcaggagaatggcgtgaacccgggaggcggagcttgcagtgagccaagatcgcgccactgcactccagcctgggcaacagagtgagactccgactcaaaaaaaaaaaaaaagaaaaaaaaatcaagtctcttccctttttctaagtttatacattgcagtttttaaacagttaacagcacaaggccgggcgtgatggctcacgcctgtaatcccagcactgtgggaggccgaggcgggcggatcacgaggtcaagagatcgagacaatcctggctaacacggtgaatcctcgtctctactaaaaatacaaaaaattagctgggcgtggtggcgggcgcctgtagtcccagctactcgagaggctgaggcaggagaatggcgtgaacccgggaggcggagctggcagtgagccgagaccgcgccactgcactccagcctgggcgacagagtgagactccgtctcaaaaaaaaaaaaaaaaaaaaaaaaaaaaaaagccgggcgcggtggcgggcgcctatagtcccaggtactcggaggctgaggcaggagaatggcgtgaaaccacgaggcggagcttgcagtgagcccagatagcgccactgcagtccgacctgggagaaagagcgagactccgtctcaaaaaaaaaaaaaaaaaaaaagttaacagtacaaactctttggaaaacacttcattagtatctgtcaatgttgagtacatgcattgcctatgatccatcagttccatagctaggtatacaaacagaaatgtcgacaaatgttcacccaaattcacaacctagagtgtttgtaacagcactatttgcaggagacataaacttggcagtcgtggtttatgcgtaccatgtgatactgaatagcaatgagaatgagtgaaggaccacaagccctctacggatgactctcacatgcatgacgtggagtgaaagaaaccagatacaaaccagacaaaactaaatctagaggttgcgatagtgttaccttttggagtacagtggcgggatgggaggaggagggggtctgtgacgggggaacttggtttccagaaaaatgagtgaatccagctcatcctatacaaagagacccagcactgttggccagctccagtgacccagatcctacagccccagttgagtcaccacaggcaaaaccatgtggggcagagatgaaccatccctgatggccctaccagaattcctgacctactcaattgtgaacccttaattaattaattagttaattacttcttaagagatagggtcttgtttgattgcccaggctggtctcaaactcctgggatcaaataatcctcccaccttggcctctgaaagtgctgggattacaggcatgagccatcatgcctagcctacgaacagttttttaaaaatgttggccaggcacggcggctcacacctgtaatcccagcactttgggaggctgaggcggaggatcatctgaggtcaggagttcaagaccagcctggccaacatggtgaaaccttgtctctacaaaaatacaaaaattagctgggtatgatggtgggtgtctgtaatcccagctacttgggaggctgaggcaggagaattgcttgaacccgggaggcggaggttgcagtgggccgatatcacaccattgcactccagcctgggtgacagagcaagatgccatctcaaaaaaaaaaaaagttttttggtttaagtgactaagttttgcaaaacagcagtagattactgaaacagtattcatccttgaggggctactgagaacaggaaccaaatctttcttgtatttggggtgttaaacatatttaacaatatttaatataaacagtataggcaacttttaacaatattatatactaacatataaaatttaacattttattttttgaataaaccaaataacacatgacataaagtttcctatcaactcattgaagatgtagcacacattattaattaaattactttgaggatttcttttttttttttttgagacagagtcttgctctgtcgcccaggctggagtgcagtggcacaatctctgctcgctgcaagctctgtctcccaggttcacgccattctcctgcctcagcctcccgagtagctgggactacaggcacctgccacctcacctggctaattttttgtatttttagtagagatggggtttcaccatgttagccaggatggtctcgatctcctgacctcatgatccgcctgccttggcctcccaaagtgctgggattacaggtgtgagccaccgtgcctggcctggcctgtattcttaatacctagagaatgtttcaatattaacaatattgttcatgtctcggaatcttcttcatccttgtaataaggtcagagatttaaaaaatatatccaacagctttattatgaaatatatataaaataatttattagaatgaatatcttatttatgtttaatttttattttatttttaattttttttgagacagagttttgctcttattgcccaggctagagtgcaatggcacaatctcggctcatcgcaacctctgcctcccaggttcaaacgattctccttgcctcagcctcttgagtagctgtgccaccacgcctggctaattttgtatttttagtagagacaggatttctccatgctggtcaggctggtctcaaactcccgacctcaggtgatccacccgcttcagcctcccaaagtgctgggattataggcgtgagccactgcgcctggcctatttttttatttttttaagagacagggtctcactgtcacccagcctcaagtgcagcatactacagccttgaactcctggattcaagcgatcctcctacctcagcctcctgagtagctgggactatgggcacatgctgccacacctcggtaactttttaaatttttagtagagatgaggtctcactatgttgcccaggctggtcttgaactcctgggctcaagtgatcctcccaccctggcctcccaaaatggtgggattccaggcatgagccaccgcacctggaccacaaattaattttcatatcattagacaacctgaaattttctgttgaaattgatacttggttttctttttccttttcattttattttttaagacagtgtcttgctctgtcatccaggttggagcgcaggggcatgaacacggctcacccaaacttgacttcctaagctcaaggatgtcttcttgcctcagcctcctgagtagctgggaccagaggcacacaccacaatgtcctggtaacttttttgttgttttggtagcaatagggtctcaccatgctggtcaggctggatactttttttttttcttccttccttccttccctttccttcctttcttcctttcctttccttctttttcttttctctttttctttctttcttctctctctctttctctttctctcccttccttttcttcctcccttcccttctccttccttctttccttccttcctttctttcctcctttcctcccttctttttctttctttctttccttccttctttctttctttctttttcttttcttttctttctttctttcatcttactctgtgacccaggctggagtgcactggcacaatcacagttcactgcactgcagccttgacctcctggcctcagctgatcctcctacctcagcctctggagtagctgggactacaagcatgtgccaccatgcccagctaatttttttgtattttttgtagagacaggtcagggtttccctatattgcccagggtggtctcaaactcctgggctccaagagatctgcctgcttcagcctccaaaagtactgggattacaggcacgaggcaccaggcctggcctggctttatttcttcttcttctttttttttttttttttttgagacggagttttgctcttgttgcccagactggagtgcgatggcgctatctcggctaactgcaacctccacctctcaggttcaagccattctcctgcctcagcctcctcagtagctgggattacaggcgcctgccaccacatctggctagttttttttttttgtatttttagtagagacggggtttcaccatgttggccaggctggtcttgaactcctgacctcatgatccgcccgcctgggcctctcaaagtgctgggattacaggcgtgggccatcgtgcccagctgcctggctttattttgaatagcatctctgttcaattctcttccttcaactaccttttcatagtttcccctagttttatgtgttcaatcacatttgtcatttgcctagttaatccagcagttcttacgcatttttctttttttagaccgagtctcgctctgtcacccaggttggagtgcagttgcacgatctcagctcactgtaacctctgcctcccaggttcaagcgattcttgtgtctgagcctcccaaatagctaagattacaggtatgtgccaccatgcctggctggtttttgtatttttagtagagacagggttttgccgtgttggccagactggtcttgaactcctggcttcaagagctccgcccacctcagcctcccaaagtgctgggattacaggcgtgagccaccacgcctggccttcttaagctttttactttcaagattcctgacatatttactgtattgaaaattaaaactaagaaacttaggatatattttatttaaaaataataggctcattataaattaacacaaaaatgtatcattaaaaatctatgttttccaaaacacacgtagtgataaaagtggcattgttttatgttttaacaaatttttttagtgtctggcttaatagaagaaaactggattctcatatattttttatattcaatctgttgtaatacactgttttggttaaggaaaatctggcctcatagatatgtagttgaagaggtggactaactcaaaagcctattcagatcaaaatttgacaagtgttttttgttttgttttgtttgtttgagacagggtctagttctgttgcccaggctggagtgcaatggcacaatctcggctcaccacaacctctgcctctccgtttcaagtgattctcctgcctcagcctcctaaatgctgggattacaggtgtgcaccaccacgcccagctaatttttttgttttttgtagagatggggtttcaccatgttggccaagctggtctctaacacctgacctcatgatctgcccagcatggcctccaaagtgctgggattacaggtgtgagccactgcacctggccgagtatttctttctttctttcttcttcttcttctttttttttttttttttttttttttttttgagacggagtcttgctgtgtcgcccaggctggagtgcagtggtgggatcttggctcactgcaagctccacctcccgggttcatgccattctcctgcctcagcctcccaagtagctgggactacaggggcctgccaccacactcggctaatttttttgtatttttttagtagagatggggtttccctgtgttagtcaggatggtctcgatctcctgacctcgtgattcacctgccttggcgtcccaaagtgctgggattacaggcgtgagccaccatgtctggcctttgtgtgtgtgtgtaagtgtgtgtgtgtgtgtgtgtgtgcaacaaggctgtttatttcacctgggtgcaggcgggctgagtctgaaaaaggagtcatcaaagggtggtaggattatcattagttcttatatggttggggtaggcacacaaagtatgttcttaagggcgggggagaatattacaaagtacctttttaagggcggggggagactatatcttatcagttagggtgaggcaggaacaaatcacaatggtggaatgtcatcaattaaggccattttcacttcttttgtgaatcctcagttgcttcaggccatctggatgtatacgtgcaggtcacaggggatatgatgacttagcttgggctcagaggcctgacattcctgtcttcctatattaataagaaaaacaaaacaaaatagtggtcaagtgttggggcagtgaaaatttttggggatggtatggagagataatgggcgatgtttctcagggctgcttccagcgggattaggggcagcatgggaacctacagtgggagagattaagctgaagaaagattttggggtaaggggtgatattgtggggttgttagaaggagcatttgtcgtatagaattattggtgatggcctgatgcggttttgtatgaattgagaaactaaacggaagacacaaggtccgaataaaagaaggagaaaaataggtattaaaggactaagaattgggagtacccaggacatccaattagacagtgtccaagggggttcaacgtaattatttgtttggttggcgagtttttgggctctatccttgagttgttttatgttgtcatataccaggccagactgatttaggtaaaaacaacactcttcatttaaaaatatacagagtcctcctttttcagcagtgagtaaatcgaggccttggcgattttggaggaaagagaaatgcaaagccagcaactgtttgtttaaaaagtattagaaacggctagcagagagtgagagagattgatagtgtggtggagatagctggggagagttagagggtggcataagaacgagaatgagaataagagtgagtataaaagtaaagaataggacttcatcagggtgaaagtgttggcatgtgtcctgtcagcaaagatccactccaagagggagtcaagagtggtggactggggatagattttcatgatgaaaaggaaatgagaggttttaagaggcaggctatcggcttgtaacctacatggaagaggttatgaaatgacgacagaatagaatgggcctgtgaggctggaaggagattttttttttttttttttgggtctaagaaccatctgccttgagtggagaggaattgataggtggaaacttcatttggagagtaaataggagtgaccagtgagaaagagaaaagctggccatgagggacagaagttggaacgctagctgcttctttagctaccttatcagcataagcgttgccctgagcgatgacatctgatgccttttgatggcccttgcagtgaatgactccagcttcctttggaagtaaagcgactttaagaagcgtttttattaaggaggcaataatgatggaggactcttgtgtagtgaggaaatttctttctgcccatgtaacagcatggtggtgcaggatacggaaggcatatttagagtcagtataaatattgacgtgtagtccctttgcaagagtgagggcccaagttaaggcaatgagtttggcttgctgagaggtagtggaggcgggcagagcagtagcctcaatgatagatgtggaggatactatagcatagcctgcctttgctggtgagtggtgattaggcctggtggaactgccatcaataaaccaagtgtgatcatggtgagaaacaggaaagacggaaatatggggaaatgtggtgactgtcaggtggatcagagagatacagtcatgggggtcagttctgatatccataataatgtgggagttcggattgaagtctgggccaggaacaattgtaattgtgggagactcaacaaagactgagcatagctgaaggagctggggggcagaaagtatatgtgtcaagtgtgaggaggaaaatagattttgaaagttatgggaactgtagacagtaagtggagcatagcgtgtgatcttgagggcctctaaaagtattaaagcagcgggagccgccacacacaaacatgagggttaggctaaaacagtaaggtcaagttgtttggacagaaaggctacagggcacggtcctggctcttgtgtaagaattctgaccgcatagccctgtacttcagggttgtgtaatgaaaagggttgggatgagttagggagagctagtttgggagcagcttttagggctgttttttaaggaatggaaaggggagtgggaaaaggatttaggatttatggggtcagctaggtttatctagaacagaataatgggttgtggagggaggtgttgaggatagaagagtatatgggtttggcaccacagggtagataggcaagacaatttagttgataaggtgcagatcctgaactaacctgtaagacttgtctggtttttggacaggtaaaatgggggaattgtaaggagagtttataggctttagaagaccatgctgtagcaggcgagtgataacaggctttaatccttttaaagcatgccatgggatgggatattggcgttgattggagtaagggtgattaggttttaatgggatggtaaggcgtgcatgatcggtcaccaaggagggagtagaggtgtcccatacttgtggattaaggtggggagatacaaggggaggatgcgaagaaggcttcgaactggggaaaagggcagcaatgaggtgtggctgtagcccagggatagtcagggaagcagataatttggttaacgtgtcttcacctaataagggagctgggcaggtggggataactaaaacagagtgcataaaagaatgctgtccaagttggcaccagagttggggagttttaagaggtttagaagcctggctgtcgataccctcaacagttatggaggcaagggaaacacgcccttgaaaagaaggtaatgtggagtgggtagcctccatattgattaagaaggggatggacttaccctccactgtaagtcacccaaagcgtctgtgatggtcctgtaggcttccaaggcgatcgggcagtgtcagtcttcagccactaagctgagaagatctgggaagaagtcagtcagagagccttaggccagagttccaggtgcgctgggagtggctgccgggcgagttggacagtccgatttccagtggggtcccacacagatgggacgtggcttaggaggaatcccaggctatgggcattccttggcccagtggccagatttccggcacttgaagcaagatcctgggagaggcagtcctggaggaatgcctggcccctgcggtttaggcgtttggaagttcttgtgtgctggagatgtggctggggtttctctcacagcggaggcaagtaattgcaactcttctctattattgtacaccttgaaggcgaggtcagttaagtcctgttgtgggttgagggccagaatctaatttttggagctttttctaatgtcgggagtgggtttggtaataaaatgcatattgagaataagacagccttctggcccctctgggtctagggtggtaaagcatctaagagttgttgccaaacaggccatggactgggctgggttttcatatttgatgaaaaagagcctaaacgctaactgatttgggagaggtcggataaagaaaaaggagcattaaccttggctatgccttcagctccagccacctctctaagaggaaattgttgggcaggttggggagggctagtcgcagaacgaaactgtaagccagatcgggtgtgaggaggggaggtaatagaagggttctacggtgggggagtggaggctgaagaagagttgggactggtgaggagcagcctggggaggagggaagaggtcacatggatctgtagaaaaggaggattcacaggacttagagcttggggtggagactgaaggaacagacaggagagaaagaagaaagatttgggacgagtcgcattgggagcagagactagggaggggccaatgtgtaaaagaatggctggacgtcaggcacctcagaccatttgcccattttttgacaaaaattatctagatcttataaaatggagaaatcaaaagtgccgttttctggctatttagaactgttatcgagtttgtattggggtcaagcagtattgcagaagaaaataaggcatttaagttttaggtcaggtgtgagttgaagagcttttaagttcttgagaacacaggctaagggaggagaagggggaatggagggcggaagtttgccctaagtgaaggaggtaagtttaaagagaaaagtagagacacagagaagaggggcggtgagtagtcaaagcaggtgttcccgcaattgacttgccaccaagggaatgtgggtgaatgaccaaggcaggcattcccgcagtgatcagacaccaatggagtgttggtgaataatcaggcaggcgtccctgcagtgattatacaccaagggaagactgtcctcccgagtccgtgaccggcactggagttttgggtccatggataaaatgtgtctccttgtctctactagagaggaaaaagaactggaattggaaggacagggagattaaagggtagcgagagaggaagattgtgaagggtagtgagagaggaagattgaagggtagcgagagaggctggtgaggagtgaaaagaccgcttatctgatttgaaattggtgagatgttccttgggttggttggtctgaggacccgaggttgtaggtggatctcctcacggagtgagggcaaggacaggggaccggtctcctgaaggagtcctcctgtcccgggtcttcagcaccacatgtcacgtgcagccgtgtgaagagaccactaaacaggctttgtgtgagcaacaaagctgtttatttcacctgggtgcaggtgggctgagtccgaaaaaggagtcagccttttttttcttttttttttttttttgacagagtcttgctcttgtcgcccaggctggggtgcaatggcacaattttggctcactgcaacctctgtctcctgggtttaagccattctcctgcctcagcctcccgagtagctgggattacaggcatgtaccaccacacctggctaattttatatttttagtagagacggggtttctccatgttagtcaggctggtcttgaactcccgacctcaggtgatccacccgcctcagcctcccaaagtgttgtgattacaggcgtgagccaccacgcccagccttgtgtttttttcttaaaggttagttacaatgtagaatctgaaccatatcaatgagctgttgatactgttatattgaaatctattgctggttcttgcactttgatctattacctaaacatgatttcttatatcatgcactggtcatttggaaaatactggcttggccaggtttggtggctcatgcctataataccaatgctttgagaggctgaggtgggagcatcacttgaggctaggagtttgagaccagcctgggcaacacagtaagacctccatctcaaaaaacaattggactgggctaggcgtggtggctcatgtctgtaatcccagcactttggaaggccgaggtgggtggatcacccgaggtcaggaattaacaacacggtgaaaccccgtctctactaaaaatacaaaaaaaaaaaaaaaattagtcagtgtggtggtgcacacctgtaatctcagctacttgggaggctgaggcaggagaattgcttgaacccgggaggtggaagttgcagtgagccaagattgcacccctgcactccagcctgggtgacagagcaagactgtgtttcaaaaaacagaacaaaacaaaaattgtactggattatgcagatcctccaaacattgacacattttattacacagcattttaaaaatcacatttgttcactcgtgtggtggctcacagctgtaataccagcactttgggaggccaaggtggatcagttgagcccaggagttggagaccagcctgggcaacatagtgagacctcttctccacaaaaaaatcatggtggcacacactcgtagtcccagctacgagggaggctgaggtgagaggatcgcttgagcacgggagtttgaggctgcagtgagccatgatcagaccactgcactccagcttgggtgacagagtgagaccctatctcaaaaatgaagaaaagaaaaaagaaaatgtcttttaaaaacccaataaatagccagttggtcagttgttatttcaagcaaaaatggtattccatgaaaatggtggctaagttggctgactatccagacaactgcaccagtgcttttcctagggacagccatcatacttcactgtgcagaagtgctttacgcagacttcccatttgtcacgcatattaaaatacatgtactcgagggttgatatttaatgaaattaccaattgttactccttcaccaagaacattcctatgggaaacttttttttttttttttgagatggagtcttgctctgtcacccaggctggagtgcagtggcactctctcggctcactgcaacctccacctcccaggttcaagcaattcccctgcctcagtctcctgggtactgggattacaggcgaccaccaccaagcccggctaatttttgtattttttagtagagacaaggttttgccgtgttggccaggctggtcttgaactcctgacctcagatgatccacccacctcagcctcccaaagtgttgggattacaggtataagccaccgtgcctggcaggctttttcttttttgtggtgagtgcatggtggtgaagatttcaataatgatgacacaggtcagtgtcactgtccagatttccactgagatgcatttcacccatccttgcttttgcatcatcagtacaaatattcacatagtgacaccccacatcttagtctgattatgaagttttgacctcgcagacctccagaaagggtctcagggacccttgggcacctgtgggatgatgtcttgtgaactgctggactagcactagagagagacatcttaatgtcagcctctttgtaggagcagatagggtgtttttcaggcgctaaagcaaaggaaggcttagttcagattctgggcagatggacccaacagggccattagctgggcctggtccatttacagcaaacttattttcccctgcatctcctgggtcatgcttcctggggacaaaccccagtctttcccaggaagagctcactcacatctggtggcatagaggcccagaaccgaactgtcagtgatgccaaactggatgctatgtgaggacaggctgggcattgggaaaggctttgggaggatgtggaggagaaaatggtcagtcttcagagatgaggacttctttggacagaatgtgggggaagacattttaaactgtgggcattgcttgaggaaaggtaccagttctgaagtgtgaaacccaccgaggagagagacgtgcagttcaagtagtagtgttctggctgggtgcagcggctcatgcctgtaattccagcactttggtaggctgaggcaggtggatcacctgaggtcaggagttcgaaaccagcctggccaacatggtgaaactccatctctactaaaaatacaaaaattagctgggtgtggtgtaatcccagctacaaaaattagctggatgctcctgtaatcccagctactcaggaggctgaggcaagagaatcgcttgaacccaggaggtggaggttgcagtgagctgagattgcaccactgcactccagcctggtgacagagtgagactctggactttattcagcggacaataggaacttcatgaaacatacagttgatttctacatttaataaaaaaataatttaaagtacccagagtacttaaacttctaggaatgttgatgaaataggcacgtctagttataatatctaatttattactttagttacacatgcatatttaaaataacattatatatataatacattaatacaaaatattgcttttttcccattctcacatttcaagtaacaattttattcactctctacatgcatcttggacatcaacgtcttcatggtatctacagtccatttctcaaagtgtatctccttcacttgcatctaagctgtctgagatgcagcacttctcaaatacatgtctgactcactggcaagtttgacccaagttaccacattaggaccatcctccccggcccccaatttatcatgtaggtgtatttgtaatccttacaacaaaattacttattgcttttgtaattgctctttgaaaggcagattatgaaacctaactcttgcaatagtgagggaatgattttcctggtataatgacttaagtttcttccttcccctctaatccattccaataagaggactctataatggtacaaaacttcattgtttgaggttgctgtgggtagtatgttaggagaaaccagaggtagagcagttgcaggagatcaccaagtttggttacaggtgcaatcgaggagtgaaacgccagtcttgggaacaggccagattgccgggcagactgccatcatggacagtgatgttcctggggtgggaatgaagtgacgaaacctgggagtggtagatggaagacttggagaaacaggcaggagcggcttggagctgagcagatggcaaaagtgaaagggcagtttcagatggcaaggctgtggaagcagcactggctgggagtgggtgctacggacaatgatgatggggtgtggggtagggagtcaggactgggaagaaatggtgtcttgagacttgcagaatgggcaagtcctagagaaagagtgagatggtcacaaagtctgtaaactgcagggttgagggagggcacctaaactgccccccgcaggtcccttactgtctagtagcactcatcccattgagtggtcattgcttgctttctggactgcaaggagggcaggcagtgtttgtcttggatactgctgtatccccagcaactacaacaggcatataataggccctcaggaaatacatacctgatgaagaaatagagagatgaaggaagaaggaaagaaaagactaaggtatgagcattctctgggagggacttgaaaaggaggtcagcgaaggagagacaggccaggaaaggcatggtggggacctcagagggaactgaggacctgaggtgcaaacagaaagaaaatgaaccagacaggatttgtgtgagattccactggaaccttgggtatgatcccaacagccgcaagtctcagcctggactgtcacgggtactgttcccagcaaaggggctggggagtggatgactatggggctgaaactggtctgtggcctcttctaagcctcatcccagcaagagacttgctttgatggcctcagatctgcctaggcaaccagagactgagaaactacagtggtgtttgggtgttctcagctttgataaacatctgaataatagtaaaggatttatgtgcttgtttgggtgagtcataaataataggtctcaaattacatttctgtatagcatggtcattcccaataaaagggaatgaaaatattcatttcccaactcacaggaaagattttaaggcagggattcttgaaaagtatggtctccagagcagcagcatctgggaatttgttaagaatgcaaattcctgcctgtaatcccagcactttgggaggccgaggtgggtggatcacgaggtcaggagttcagaccagcctggccaagatggtgaaaccccgtctctactaaaaatacaaaaattagccgggcatggtggcgggcgcctgtagtcccagctactcaggacgctgaggcagagaactgcttgaacccgggagacggaggttgcagtgagccgagatcgtgccactgcactccagcctgggggacagaatgagactctgtctcagagaaaaaacaaaaacaaaaacaaaggcaaattcttgcaccaccccagacctactaaattagaaactttggggattaggcccaatgatgcacattttcacaagtcctccaggggatcctgatgcatgtgaaaatttaagaaccactgctttaaggtagatagatgggatgttttccattttaaagtgaatccctctaatttttttctgaagtttttgatatcttctatacttgtctgtggtgagtaccaataagcaggaaaatgagagaagagaacatttgcaggatagcacagttgtgagtaagagggcagtttcccctggctgagaccctggtgaaattcctttacctcttttttttttttttgagatggagtcttgctctgtcgccaggctggagtgcagtggcgcgatctcggctctctgcaacctctgcctcccaggttcaaatgattcccctgcctcagcctcccaagtagctgggattacaggcttgtgccaccatgtccagctaattttttgtattttagtagagatggggtttcaccatgttggccaggatggtctcgatctcctgacctcgtgatctgcctgtcttggcctcccaaagtgctgggattacaggcatgagccaccacacctggcctcctttacctcttaagcttgtcttctttataagaagggaaaaaatggccaggcatggtggctcacacctataatcccagcactttgggaggctgagatgggaagagtgcttgaggccaggaattcaagactagcctgggcaacatagtgagaccctctctaaaaaaaaaaaaaaaactttgtttaaagaagggagaaaatcagtacttacaagattatcacaaggatcaaatgagacgctgcctggcacacacagtgtttactcattatgctgattattattaccactgcagaactcaggagctgattactttatggaattagctcaacagctagctaggattttccaaggttataattttatactgcatgcatatagtaactgtacaatagtcttgtttttaagaattcacatgtcccaaagctctgcagagccacggagctgagactgactttacggcctcttctaagccttactctaaggtaagccctgttcagagacttgccttgatggtctcaggcatcaagatgctgacatcttgtaaaccaggtgctcaacacctgaggaaaaacctccagtcttgcagcaagtgaatggagtggcacagcaactggtccttgcggaaggatgaggctgacaggacacagaaggggcacttctcttcagctccccctctcggctgcagctctccctatgggtctatagcaggagagcctgatgttttccagtagaccttggtgggtacgagacctaaatcatgggctccaaaggccatcttgaatcaaaactaccagcatattttttttttctgagacagagtctcgctctgtcacccaggctggagtgcagtggtgccatctcggctcactgcaatcttcgcctcctgggttcacaccattctcctgcctcagcctcccaagtagctgggactacaggcgcccgccaccacacctggctaatttttttttttacttttagtagagacggggtttcaccatgttagccaggatggtctcgatctcctgacttcatgatctgcccaccttggcctccaaagtgctgggattacaggtgtgagccactgcgcctggccaataccagcatagtttagctgctatcccaacttccattacctcttcaatagaatgcaagctccaaggtgcctgcaagtttttattccttcctgtgtccctgtaaacagtgcctgccacttacagggtgactgaatgggtgaatatttactaaaccaatagttacataattagaagaaacaaaaggtactctttgccaagaagagaagactaagaaaaacttgaaagaagtgtggggcttccttcagctggagcctctttccaagttgtatggtgtgtggaattcttactgtgatgtgggagaggccagcctggggtcacttacggatgagtctgaaggcacagtcaatatacaggagtcagctgaagctggggaaatggcacagttgttgcaatcctcgtctctcatttgcttcttggtaaatcccagctcctttcaagctgaaactaagccctctctaggctccttgcccacagactgggccagtctgacaggtgcttcagtggtatgaggggtggggtggggaaggagatgcactgtcacctttaggcaaggggctgaatgcatccaggtgagttctgtgacattctgaatgtgccagagcaggcagtttgagaggaacagactgaggaaatacttgtttacataaagttactaaggcaggaatacccactctcctgtgtgccaagcaagccagtgggcagcaaccctccctgaacatgaatgccctcagggcctttactcacactgctccctccagtgtcctttattggacatcactggccatctccacctgcccagaatccacagtatcaccgctcctactctgcaccacgcccagtcctgcccaagcagaggggcttcctctagtgctcaatgttcacccggagagggcctcagtgggtaactattagtgtgggccaccaaagttgtaaccttgaggggttttacaaggccagagaccttgcctagtatatagaattggcaggtatttacaaattttgtaaaaattatctctcccgccaaacttctaccagtactctaaccaaaaagctttctatttctgggtttattacaattgctaaaagcggttataatcttcattattctttggaaggatctgagaagcatgaaaaggcactggcccaggcctgagttctaatggtgatcatctcacaagccagggacttctccccttcctgggcctcagtaactgcttgttataaaaacaaggggtgtcttttagctccattaggttaggataccattttgagagaatacacatgacgacttaagtgaagtttactaaagaaaaattattctccagaaatcagcagtactttgcagacatgctgagaatacataatcattaggcattagggcagtatggcagtattttagccaaactcctttcacgtaattaaaaaaactcacttcagactggtttcaaaaaatcaaaaaacagaccgggtaccatggcttacgcctgtaatcccagcactttgggaggccgagacagggtgatcacctgaggttgggagttcgagaccagcctgaccaacatggagaaaccccgtctctactaaaaatacaaaattagccaggtgtggtggcgcatgcctgtaatcccagttactcaggaggctgaggcagcagaatcacttgaacctgggaggtggaggttgtggtgagccgagatcgtgccattgcactccagcctgggcaacaagagcgaaactccatctcaaaaaaaaaaaatcaaaaatcattataaggataactgacagattaatgtagtccaatgcaaggatgcaggaatagatgcagaaaccaaggatgtcttcagggttatcaaggtacctgctatctcaggcccacatgcttctgtttgtccatgcagtgctggctcctgattttgtaagtgccacatccaagcaccattccagatggtgaacagtatctctccttccccatgcaaaattcttttttttttttttttgagaaagagtcttgctctggagtgcagtggcacgatcttggcttactgcaacctctgcctccccggttcaagcatttctccctgcctcagcctccccaggtgcccgccaccacacctggctaatttttgtattttttttagtaagagacagggtttcgccatattggccggactggtcttgaactcctgacctcaggtaatccgcccactttggtctcccaaagtgctgggactacaggcatgtgccaccgcacccggccaaaattctttttttttttgagacggagtctcactctgtcgcccagactgtagtgcagtggcacgatcttggcttactgcaagctccgcctcctgggttcacatccttcctctgcctcagcctccctagtagctgggactacaggtgcccaccaccacacccggctaatgttttgtatttttagtagagacagggtttcaccatgttagccaggacaatctcgatctcctgacctcgtgatctgcctgccttggcctcccaaagtgctgggattacaggcgtgaaccactgcgcctggccaaattcttttttttttgagacagagtcttgctctgttgcccaggctggagtgcagagatgtgatcttggctcactgcaatctctgcttcctgggttcaagtgattctcctgccccagcctcccgaggagctaggattataggtgcccatcaccacatctggctaacttttgtctttttagtagagatggagtttcaccatgttgtccaggctggtctcgaactcctgtcctcaagtgatctgcccatcttgggccttccaaaatgctgtaattacaggcgtgagccactgcacctagcccaaaattctttttcttatttttatttttggagacagagtctccctctgtcacccaggctggaatgcagtgacacggtctcggctcattgcacaacctccgcctccaggttcaagcgattcccctgtctcagccacccacgtagctgggattacaggcgtgcgccaccatgcccagctaatttttgtatttttagtaaagacagggtttcaccatgttggccaggctggcctcgaacccctgacctcaagtgatccgcctgtctcggcctcccaaagtgttgcaattacaggcatgagccaccgtgcccggccccaaaattcttaacattaagaactgtcttgggcctgtctggatcaggagttcaacccaggtccaatcaactggtgtgtgggcaagagggaggagagggcgagagaaaaggtcactgtgtagaaacataaaccccactcctgaagtcaggcaggtacccaaacactgtcactggagagaggtcagtcacttcatcaggtgcttagctctcagtacttaaataaaacagcaaagaagtttgtactttgttacaattcagaatgaccttcccctccaaattcctactgaactagtcaaacctccagtactgtaaactacttacatttcgaaaagctctactgaatgttgaaatccaagtagaaaaagttataaaaagttactccctgttttattgctgttcactggatttggctgacatttgctttttactttcatcaaatcttaccgaatgatgaagacacatcaagttacaaaggtaccactttctctctaatatcttttctttttaaacaatttgtgtcaatgtcaacaacatgataaagatgaagggtgttcaactgattatttgaacccataaaaactccaccagggaatcttattttgtgggcacaatgcacagagcctggaacatggtgggtgctcaatgttggaggaatcaaattccaactttaaaatgagtacaaggacctactttagatcaaatattaaatctggctaataatttcgggccacactccgcttctgtgtctcaaagcaggtggggcagaaaaaagtagccgagtctcaaatttgctgctattctctttataagcagtttacaactacttggcatctctagctcagaagcacaaaatgtatatacaaagaaatgattagaatttatcttaactgaaagcactagtttaaacagcctagagtcttgtagaaattgttattccaaaacatgcagaggcagcaagagttgcccaaaaccacattttattctataacctttatattgcttttctgttaaagattgaagcaatgtgaagtggatggaaatattttgttaaaagaacaaaatgaattaatcacagcatagatgactaataaaaaccttgggtttatgccatacacttcaaacacaaggcaaagtccagtagtggctcatgttctgggtttttagaaagcaaatgaaaatatttggaaagatcaatatatttcaacagaagagccataaatgccctgaaagcagaaagttgacacaattttaaatagaattcatatatatatattttaaaatcaaacacaattaaatataatatggtttaagtacatgaatacttcagctttaaaagaataacagaggtggtacatagtaccaaaaacttacacaaagcctttttgcttcttctgtcgatgaaacagtgtgcctctatacaatcaaatattgcaatggaataaattctctgttcattcaagactttctcaaggacaaaagtgattaataattatatatttatacatatatatatatatttttttttttgcaaagtctgagcaaaagcagtaacatctaagagaactttctttcctctcaatcatgtgcattgaggaagcgctggcgccacgtggtcaatggagtgtgctcaccaactgggcagtcctgctgatggctgtgtgatcccgatgcagaagccaactgagcagaagtgcagtgagtgagtctcttactatcctaaagaaaggagaagaaagacgaccaactgcacactttccagctcacagcaaagaatgggggaggcagtcaaagtcaaatgtttctctctccccagtcatcctgctcaccttatttaaaaaaaaaaaaagtataatttgggaagaactgctttgttcaaggtgccacaggggcaaaagtggagtcatcgctatttctttctttctttccacatgtattctgaagggaaagttaagtaactggagtgcagaattccaaaggggcaaatcctaatgctcaaagtaaaccagattcacacccttctgttagcaggggagagaatggttttaagtatagtgcatctcaggaggaggaattaaaatgtgaaaactatatactgccatcagaggaaggaggaagtcactgaaacttgacccatgacttgtcagtttccttccaaattaatgccgctgtcaagaagactgcataattaactctcaccctgttccgctgaagctgctagcaccacgctgccactcaaagctgcctggctctcggtggggctgactcacctgctttggaaggacaaagcaaaccacctctggcacctgctttacaatgctgattagggatgagttaccactacgagtgtgcatcaagtatcagttctatgcttatctgcttcccagaggatgtggtccctgtctattccagtaggctaaaacactctcataaatgggttattgccattggaaaactaataattttctagtaatgtaaacaataccattttgtatctttaagactctcactgtgtgaacatcatgtgcatcaattatgcctacaggtaactgcattatggtggaagtctaggattgtctcccattctctcctggaaacaacagtgacagatcagaaatatagtgctgttttcattggctgtgttgaagaatccaaccaagggaaaaaagttctcttatttttcacaagcagatttcctttatctcaagttttgagtcataactgaaaaaagaaaagaaaagaaaatggtaaggtgcatttctctaacaagtgacctattattacaaattaaggatggacaccaacacttagtgtttactatataccagagtttaagacagccagaagctgactacaattttgtgaggtaaaatattgtaattttccttgttaaaatatgagtgaacagaagcttaaagaggttacgtaacttacccaaggggcatataacaaggactggcatccagacttgctttcccatgttggcaatagatattagaatgaaaaatattgccaattttcaatagagtaattctacttctaggaattaaccctagagcatattcaagagggatggtaaagacacacatgcagacattcactgactccctcctgtagtcacagcactgcggacaaatatcacggaagacaaggtccccggtattgtggcatgggacatgtgcacatgaagcaattcagtaatggtgtgaggtagtttatgctgaatgtccaagtacatcctataggcaaatgtcgagttggaggttgaagcagagaggtatcaacacaggataaagagaatgagtattccttcgcaggcctaggacttcatgcattcataaaatcatggaatgaggattagaaggggtttttcttttggggttttggtgtcgaatttctctgatctactaatgaggacatgaggaactaaagtagtcacctgcaaaaggtcacacttactgcctaaagtaaagaaaaactcagctagttcttcgagtctactgtttttttttgttttttttttgagacggagtttcactcttgtggcccaagctggagtgcactggtgcaatctcagctcaccgcaacctctgcctcccgggttcaagcaattctcctgcctcagcctcccaagtagctgggattacaggcaatgcgccaccacgcccagctaattttgtatttttagtagagatgaggtttctccatgttggtcaggctggccttgaactaccgatctcaggtgatctgcctgcctcagcccccacaaagtgctgggattatagacgtgagctaccacgcccggcccccatttctggtattttttattttaagaaattccatttggttcttttaaaactattttgcatttttctcattatactcttgttttctttaacttttttttttttttttttgagacagagtctcactctgttgtccaggctggagtacaagtggcacaatctcggcttactgcaacctcaacctccacctcccgggttcaagtgattcttgtgcctcagcctcccatatagctgggactataggcacctgccaccatgcccagctaatttttttgtatttttagtagagaaggggtttcaccatattggccaagctggtcttgaactcctacccaccttggcctcccaaagtgctgggattacaggcatgagccactgcacctggccacttgaacatatttttaatatttaaaatagccacttgatggtctttgtctgctaaattcatcatctttctcacatctgggtctgtttctatagattgagttttctcctggttataggtcaacttcatgtcatgcttggtaatttgtgattgacgtcagacattcttttttttttttgagcctgagttttgctctttttgcccagaccagagtgcagtggtgcgatctcggctcactgcaaccttcacctcctgggttcaggcaattctcctgcctcagcctcccaagtagccgggatcacaggtgccggccaccatgcctggctaagtttttgtatttttaatagagacggggttgcaccatgttagccaggctggtcttgaactcctgacctcaggtcatctacctgcctcggcctcccaaagtgctgggattacaggcatgagccactgcgcccagcctggacgtcagacattctaactttacactgtgaagtgctgaattttgttgtgttactgtaaagagggttaggcctttgttttggcatgcagttgttaggtaatttgaccctttaaaaatttgctttgaaacttggttcaggtgcttgtactctaggactaatttatcttcagtagtaaggcataacctctgtgaagacactacccaatgccttgtgtattactaagtctctctactctggccagatccttctggccatgaacttttcttagccctatgttccagcaatcattcagcctactaatttctggggggttctctacctggacacatgcgttttcaccccacacatatacagatcactcctaggccaaggatccatgggaatctctctaaatatctctacggctttctttctgggcagcttcctcttttctgctaccttatcctacaacttctactcaaattgagctctctgaactttgattttttttttgaaatggggtttcgctcgtcgcccaggctggagtgcagtggtgtgatctcggctcactgcaacctccgcctccctggttcaagcgattctcctgcctcagcctcccaaatagttgggattacaggtgcctgccaccacacccggctaagacagggtttcaccatgttggccaggctggtcttgaactcctgacctcaagtgattcacccgccttggcctcccaaagtgctgggattacaggcgtgagccactgcacctggcctgaactttgatatttaactctttcgttcagcaagactactgggctctgtttggtttccatggtttccctgtattgcccattgtccaatatatgcaaacagttgtttcatttagtttgtcaattttctagttgcttatgataagaaggtaatccccacagcagttaatccttcaaaggcaaagaaaccccttatgttcttttttatttttacacctggaaaataatactttttagtttacacaaaacgaagtcatccttacctttgtagatttctctaacggttgatcatactgagcctgctgcataatgtcactgactatcattttagcaatcttccaagctagctcttcctgggcctaaagaaaataatttaaactggtgataatggttattcattagatggatcgagatgcacatactcagtgctcttaacaaatggcttacgcacataatttctacttatttggataagaatttcattcccatgtacgaaaaaacctgggccaccctctggctatgaatattaacatgtcattccctgtcttccagtgtcaactactggatacctaacaccgaactactttcatattagatggtcaaaataaaacattttccttttttcacctcccatctctcaatgtacttaattaactattaaaaaagcaagcctccactacttgaagtaaaactgccagtggggaaggaaacatttgagcttttgatctacacactgattactgatgcctgctggctgatggaaacttgaatgcatgtatatccttcagtggtcctagcctctgactgaagataccttcactgctactaccaggcaattgttagatgttaagaagggaccaccctttcttggtacattctgggtaagagaacataaatgtgccatgctgcttaaacatgggacctaaagaaaaggaaaattttaaacctcacttacatgagggtggcacttataaacagaaatctttttatcctaaaggtaggatttacctcatcagtatttccttgcacccatttcttcatagcttgtgagaacatggatcctagtaaacaaagacaaaattgaatgtacatttcatgcataattttacattaaaaatgctcttatttggctggccatggtggttcatgcctgtaattccagcactttgggaggccgaggtgggtgattcacctgaggttaagagttcaagaccagcctggccaacatggtgaaacctgtctctactaaaataataaaaatcagccaggcatggtagcaggtgcctataatcccagctactcaggaggctgaggcagaagaattgcttgaacctgggagcagaggttgaagcgagctgagatcgtgccactgcactccaacctgggcaacagagcgagactccaactcaaaaaaaaaaaaaaaaaccactatcaccaccaccaccacaatgctcttatttaaaagctgttgcttccagatatggatattcttttttgtgtgataccccaaaacactaaggaatgttacattaataaaaactgattatattgcttacataacagagcatttaacttgcaaacatcatggcttgaaaaacttttgaaaaggtgtttcagagttctggacttttcttctactctcctcacttgatgaaagaactaacatctagtgttagtttgtggcaaacattaaaaaacaaaacaaaaccaaaccaaaccctaaccaggataatgctcttgggtaagaatctagcaatacattgggagacaccaacacatttgttatgttttcaaaccttccagaccagctcctatataaaagggcttctaagacagagtatgctgctacattctagttctctagtctatataaactagctgggtgagagaagagtttcaaagagctctactctatccaagccagagtacgccttaactccctaggatgtataagcccacatctgtaatcacatgctgagaatcatccgaagtaggccagcctctatttctatgaatgaaatacacagcttacttttttatttaataatttgaacatgctcacttcctaactttgctttaaaacaagttaattgttggtagattatttcttgaggcaaggtcctgtttaattcaataactgaattcataaaaaatacaaaacctggatccttttccctcaatttttattattacctaagggtttaaatattggtttaatgaaattttactgccaaccagagtctacagagtcacagtgttaaatgctctgcatgaaggctcaactggctgttgaatcaccccatgcactgttctctcgtcaggcccccctgcagagtcactctattgacatgttagaaaacccatgttaaaaaaactcaatctaccttcccaatttacacatgaaatctgccaccaaatttcaccttagaattcaaccttggacatatcataaatccgaccttccctctaattcttgctaccactacctaactttgaatctttttcttctcctatcaacattaccagctaattccactggctgactggtgtccctcatgccagtctctcccacctccaattcattctcattctactgacagggaaaagcatctggttagaactctgtttagaaatctctgggctgggcgcggtggctcacgcctgtaatttcagaactttgggtggctgaggcgggaggatcacctgaggtcaggagttcgagaccagccacaacatggagaaaccccgtctctactaaaaatacaaaattagccaggcgtggtggtgcatggctgtaatcccagctactcgggaggctgaggcaggagaattgcttgaacctgggaggtggaggttgtggtgagccgagatcacgccattgcactccagcctcggcaacaagagcaaaactctgtcacaaaaaaaaaaaaaaaaaaaaaaaaaaaaaaaaaagaaatctctgatgtctacatgatgggagtcagtctaagctccttaaaatgacatgtaagggatttatcaatttaagtacagttttgtctcccaccaatgtatcgaagcacaagggattgccactacattgggcacgtgctcataacatcattttacaattccttcttgttacactgtctcttagatgattttaatgtaacttcttaagttatcttgcttgcccttctcataatctcagaaggctcttttcaaaactcaatcttggctgggcacggtggctcacgcctgtaatcccagcactttgggaggctggggcgggcaaatcacttgaggtcagaagtttgagaccagtctaaccaacatggtgaaaccccgtctctactaaaaatacaaaaataggcgtgtgccaataatcccagcactttgggaaactgagacgagtagatcacctgagatcaggagttcgagaccagcctggtcaacatagtgaaaccccatctctactaaacatacaaaaatgaactagggatggtggcacgtacctgtagtcccagctactggggaggctgaggcagaagaattgcttgaacccaggagacagaggtttgagtgagccaacatcgcaccactgcactccagcctgggtgacagagcaagactccatctcagaaaaaaacaaaacgaaacaaaaacagaaaattagctgggcgtggtgacacgtgcctgtaatctcagctactcgagaggctgaggcagaattgcttgaacctgggaggcagaggttgcaaccagctgagatggtgtcactgcactccagcctgggccatagagcaagactgtctcaaaaaaagaaaactcagtcttttcctctgtgctctattatcaaggtttcaaaactcaaattaaagctataggctagtaaatgatgaaaattctttccagctgccctcaataaggaaggagagaaaggcagaggaaggggagccgaactgtaaacaaaccattgtcaaggtggtattctgaaccaaagccctgtagttgctactaacctgctgtgtgattcctaacaaatcacagaccacaatctccacattcctcaatttctttctttcttttttttttttttaagacagagtctcactctgttgcccaggctggaatgtagtggtgcattatcagcccgctgcaaactccacctcctgggtttaagtgattctcctccctcagcctccctagtagctgggattacaggtactcgtacccgccaccacgcctggctaattgttttttttttttttttttgagacagagtctccctctgttgaccaggctggagttcagcggtgcaatctcagctcattgcaacctccgcctcccgggttcaagggattcacctgcctcagcctcccgatagctgggactacaagcgcgtgccaccatgcctggctaattttttgtatttttagtagagatggggtttcactgtgttagccaggatggtctcgaactcctgacctcgtgatctgcctgccttggcctcccaacgtgctgggattataggcgtgagccaccacgcccggccctaattgttgtatttttaatagaggcaaggctttaccatgttggccaggctggtcttaactcttgtcctcagtgatccgctcgccttggcctcccaaactgctgagattacaggtgagagccactgtgcccagacttcaatttctacatttgtagaatgaggatatgatatacacagatacatcatctaagaattgcattagcttgaaagtgctaagaaatatcaattatttggggattgagaagagaatggcctctgtgagtatcctcggaagtaatctggctaagaaaacttagtgtctatgtcagtgtggcaaagggcaaccaagtttaaaaaatgattttttcttacataaatataatccgtaatcttaccactcagataatcccaaatgaaattcttaagtattaaataattcagtcaataaatatttaaggagtacttaccatgtgctaggcataatttcagaatcaggaaatatagtgccaaatagtatagacaaactccctgcccacatagaggtaatattctagtcatgaaagagaaactatttttatttactttttagacacatggtctcactctgtcactaggctagagtgcagtggcacaatcatggctcaccgtcgcctcaacctcctgggcccaagcgattctcccacctctgcctcccaagtagctgggaccacaggcatgtgccaccatgcccagctaatttttaaacaattttttatagacagggtctcactttgttgcccaggctggtcttgaagtcctgggctcaaccaattctccaacccagcctcccaaagtattgagattacaggtgtgaggcaccatgtccagctgagaaataagctataaacaagtatgtaaataaatgaacaagataattttagacagtgaataagaaaataggccaggagtagtggctcactcctataatcccaatactttgggaggctgagagatgtggattgcttgcggcaggagcttgagaccagccttggtgaaaccctgtctctacaaaaagtaaaataataagccaagtatggtggtgtgtgcctgcagttccagctactcgagaggctgaggtgagaggatcatttgagcccaagaagatgaggctgcagtgagtcgtgattccagcctgggcaacagagcaagaccctatctcaaaaaaaaaaaaaaaaaaaaaagataaaaggaaaagaaaagaaagaagtggtagtgagtggtatatacaaaggattttagatcatcggagttgggaaggtccctctctgaagagataatattgagatgagaaggaggaaccatccttgcatgaaagccatggcagggcttgccacagccatgaaatagcaactgcagaggcactcaaagtgaagaaacttcagcaaaagaataaaagatagtccaatgagagctcagtccatgaaaggagtggttcaaagtaaggtgatagaggccagcaagggacatccacaggtaacagcaaagaggctagatttcattccaaatgcaacagaaagccacaggggaagagatgaggtggatgattaagcaataacgtatgcatagggcaagaaagttcaaaaagcagaggaaaaggtatattgaaaagtaaaaggcacctctttcttctcatctctaatgtaatcactgttaaattttatgtgtatccattcaggcaacattttaatgtacagaccaatatacagagaggctttcaaaaacaccatatacaacacatgatgtgttctaatctaaaatgtgtaacacgaatcatcaagactataggtgtaacttccagtttacaagaaatgtcaaggaaagagaaataagctaaataacacaaccaggaaagtacagaagattaaacattctgtaggataactgatatgcttaacaagtcagggtcattaaaaaggaaccaagctggagtaaaacagactgagactacgccctcttatttacatccttggcattcagcatagtgcctggcacatagtaatcactcaaatgccttttgggtgaataaattcaatctctaggctcctacaccaccaaaaaatacttgacttaaagagacatctggacaactaaaagaagaaccaggatatacaggggtgtttaaccaaactgcagaaattcctatttattagtttatgtgggcatgtctcaattaaattaataatacaagtaacttcatagatgggcttgctggtagaaatataatctttttgcctctaccttcaaatacaacccgaactggactggtcttccactaccagcctaatccacaccaccatcatcccttacttagactatgactatggcaagaatgttgtttctctgcttctcttcttgaagccctacactaaattttccaaatagctgatagagcaatcccttaaaaacactaaacataaaacaaaaacaaaacataaatcccatcatttccctgctccaacttccaatgtgtccctgacactttcaagtccttgccatggtctctggtgacctcccaactcactcaccttctactgctcattcctttgctcactccattccagccacacggggcttgctgttccttgatcatgctgagctctctagcttcgggcctctatccttgttcctttcaccaagaacactcttcctccacatgctgcctgggcttacgcccccgctgcgctcaggtctactcaaaatgccacctcctcagtgaggcctttcctgacaaccacctcgaaaatagcactccctactactctctcccagccccctaccctgcttttcatgtaacacatgtacacaggctacatttgtttgtctgttactgtctccgccaatataatgtaagttccatgaaagcaggaactttgttttcttccccaggacccagaacaatagatgcatacagtaggcactccactgttctataaaatgaatgaatgaaggaataacataaacagactgaatgaatagaacgagcagagatagtggtttgggaaaaaatttcctatatatcttcaactgctcataatacaccttaattcatataaaacaaacagaaactgcaaacaccgaacacctatgctatgttaacactatgctaacacatatacatatgaagcaggagcacttcttcatgagctgtcagaggtatgagaccagattaaaaaaaaaaaaaaatcaggccaggcacggtggctcacacctgtaatcccagcactttgggaggccgaggtgggcggatcacgacatcaggagatcgagaccatcctggctaatgcggtgaaaccccgtctcttctaaaaatacaaaaaattagccgggcgtggtggcgagcgcctgtggtccctgctactcaggaggctgaggcaggagaatggcttgaacctggcaggcagagcttgcagtgagccgacatcgtgccactacactccagcccgggcgacagagcgagagtctgtctcaaaaaataaataaataaataaataaataacaacaacaaaaaaaccaggccaggcacggtggctcacgcctgtaactccagcactttgcaaggcagaggcgagcggatcacgaggtcaggagatcgagaccatcctggctgacatggtgaaaccccatctctactaaaaataacaaaaaattagctgggcgtggtggtggacacctgtagtcccagctacttgggaggctgaggcaggagaatggtgtgaacctgggaggcagagcttgcagtgagccaagatcgcgccacagcactccagcctggccgacagagagagactccatctcaggaaaaaaaaacaaaacaaacaaacaaaaaaaaacagctcagagattttctattaatactggggaggagaccccattatccttatggacagaagctacctaaagacactgtagagttcttcctggccaatgcctcacaaaggtcatctggcacttcctctgttctaaaaccaccactgacctcttcccagtattccttaaaaaaattgtgttttgttttttagagacatggtcttgctccattacctaggtggaagtgcaatggcgtgatcacaattcactgcagccgcagcctcaccctcctgggctccaacactccttccatctcagtctcacaaagtgctcagattacaggtatgaaccaccatgcagcccccaatattgttcttttacccaatacaagctcacgcctgtaagcccagtactttgggaggccaaggtgggcggatcacttgaggccagcatggtcaacatagcaaaaccccatctctactaaaaataacaaaaaattagccaggcgtggtggcaggtgcctataatcccagctacttgggaggctgaggcagaataattgctagaacctggggggcagaggttgcagtgagccaagcctggcgacagagctagactctgtccccctcccacccgacaaaaaaaaagaaagaaaataagatggctgggcacagtggctcacacttgtaatctcagcactttgggaggccgaggtgggcagattacgaggtcaggagttccgagaccagcctggccaacatggtgaaaccctgtctctactaaaaatacaaaaattagctagatgtggtggcacgcgcctgtaatcccagctacttggaagactgaggcaggagaattgcttgaacccaggaggcagaggttgcagtgagctgagatcgcaccattgcactccagctctgggcgacacagcaagactccgtctcaaacaaaaaaaaaaaaaaaaaagaaaataagataaatggccagacatggtgaatcatgcctgtaatcccagcactttgggaggctaaggcgggcagatcacctgaggtcaggagtttgagaccagaccagcctggccaatgtagtgaaaccctgtctctactaaaaatgcaaaaattagccatggcgcctgtaatcccagctactcaggagcctgaggcagtaggatcgcttaaacccggaggcgggtgcacaggcatgtgccaccacgcctggctaatttagtagagacagggtttcaccatgttggccaggatggtctcaatctcttgacctcgtgacccacctgctccagcttcccaaagtgctaggattacaggcatgagccacagcgcctggccaatagctcttaatcttaaacatacttatcaaaattgaatttttcttcttacaaaaattagtatcttttactcaataaaatactgtcaattcaaccaaactaaaaacttctagataccatctgtcacggatccacatttgtttctgaaatcttcctgtgtaaaccaggaagaaaatgaaatcagtcacaaagaatgcacttgacaaaaaagatttctgttgtctaacccttggatttgactaaactactcttctgattaaatgaacaatttgaattttgacctattaatattttccacatatatttattttttttaaatttattatactttaagttctagggtacatgtgcacaacgtgcagctttgttacatatgtatacatgtaccatgttggtgtgctgcacccattaactcgtcatttatattaggtatatctcctaatgctattcctcccccagccccccaccccacgacaggccccagcgtgtgatgttccccaccctgtgtccaagtgttctcattgttcaattcccacctatgagtgagagcatgcggtgtttggttttctatccttgagacagtttgctcagaatgatggtttccagcttcatccatgtccctacaaaggacatgaactcatccttttttatggctgcatagtatccatggtgtatatgtgccacattttcttaatccagtctattttccacatatatttcattacttttatatttcattactttcatcaatcttgaggaaatttaataaaaataatttaataaggccaggcatggtggctcacacttgtaatcccagcactttgggaagccaaggcggatggattgcttgaggtcaggagtatgagaccagcctagccaacgtggtgaaacctcatctctgctaaaaatacaaaaattagccaggtgtggtggtgcgcacttgtagtcccagctactcaggaggatgaggcaggaaaatcgcttgaacctaggaagcagaggttgcagtgaggtgcggtcagaccactgcactccggtctgggtgacagagcaagaactgtctcaaaaaaaaaaaagaaaagagaaaaaatataatttaataaaataaacggtctcaaacattaagtccaacttaggtcgggtattttgccattaaataagaaaatagacaatgctttttcatattcatgtgccttctggagtggcaaagcaagttcactaacttttgattcagaggagattgcataaagatgtgactacaggaagcccttgtacttacttctgactataaacacaaggtgaaagatacagtggttactttacaaaataaacagtttaaaccttaagtggtctttgacttacagtcaatcactaatgtgagtaaaggcttaatatgaagtataaaaacaccacaaaccttttgatttccttacatcaggttcaggctcagattctcggatgaattgccccaagtcactgactcttccaaatgtcatcttcctaaataagaatgaacagaagactttaacttctaacaatcagttttaaatttaggagaaaacaatcaatttaaagcgtttcatctaaatctagaaagccagaaacacaatttatagctatcctaagtaatttaaagtagggattatttgaaataaaacattgctgcacagaaagcaagataatctttaattgagtgcaattccattcaaaatcctcagtttacaaaacatggtgagtcaacaggtaattcacaattctaaaattcacaaataagaaaaaaggcacaagaatagccaagacaattttgtaaaagaagcacccaaaaggtaggccttgctctaacaatgactgaaacatattataaagccatagttgtgtgtatacatacatctgtttatactaaaactatagtactataaaacaaagttaaaaagcaaaaagtggctaggcactgtggctcatgcctgtaatcccagtactttgggatgccgaggcaggcggatcacttgaggccagtagtttgagaccagcctggccaacatggtgaaaccctgtctctactaaaaatacaaaaattagctgggtgtggtggtggatgcctgtaatcccagctacttgggaggctaaggcaggagaattgcttgaaacagggaggtagaggttgcagttgcagtgagctgagagccgagatcataccattgcactccagcctgggcaacagagcaagactctatctcaaaaaaaaaaaaaaaaaaaaaaaaaaaaaagcaaaaaatacagtaagggtcttatttttaaggtattaccaaccaatgattagtatcgagaaacatagagaatctttttttttttttgaataatgaagtgtcatgctgaaaaaatatacagaattttaacaagtcactaataaaatcacccaacagaaataatgtgaaaaagagatgaacagtcaattcataaaagaaaaaacctgaacaatcaagagacataccaaaagaaactcaatctcattagcaaacacttaagactggaaaaaaaattaagtctgaagtattcttttttttttttgagacagagtctcactctgttgctaggctggagtgcagtggtgtgatctaagttcactgcaacctccacctcccgggttcaagtgattctcctgtctcagcctctcgagtagctgggactacgggtgcgccaccacgcccagctaatttttgtatttttagtagagacagggtttcaccatattggccagggtggtctcgatctcttgatctgcccgcctcggcctcccaaagtgctgggattacaggcgtgagccactgtgtccagccaaaagtatgaagtattcttattaaagactggtgagaacataaaatgatgcagatactttacaaagtaaattgtaagagctatcaaaatttaaaatgtaggccaggcatggtggctcatgcctgtaaccccagcactttgggaggccaagatggaaggattgcttgagcctaggagtttgagaccagcctgggcaacatagtgagacttcatttcattttttttcaaaaattttttcaaaaaaaaattttttaatctgcctcttggtacaaagaagcatataaaaagagatcctctgtaatactgggtataagagggaaaaactgcaaatgacttaaatactcattgataccaaaatggcaaaacagtaatacatacactatgagatgctctgctacagtgatgagttatagtaaatattacatacggaatactacagtgtagttaaaatgaagtaagtctgtatagatgaacataggaatgtccaaaactcactgtgaatgaaagtacaacgtacagaatggagcgtaatatcaattacataaaaataagcaaacaaaagtgcataccataagaatgattactgtgagtaggaagggaagaaaataagcaatggtacatgaacaaagaggacattaaacttaactagaaatttaaccttttataagaataatgccaggtgcggtggctcatgtgtgtaatcccagcactttgggaggctgaggaaggtggatcacttgacgtcaagaataatgcatttatcaagtcggttaaaagaaaaattctgtgaacatcaatatatcagtttattttaggcaaagtgatcttattttagagatatcttcctaataagttatttcatagatgggtaccaatataccaactgatacaaatttacttgccttgagaaaaatttcagaaagatgctaaaatcataaaactaaaacatatattaaaaccatctttatttatttatttttagtagagacggagtttcaccatgtcggccaggctggtttcgaactcaagtgagccgcctgccgaggcctcccaaagtgctgggattacaagtgtgagccactgcgcctggtgaagataatctttcaagatgaagaaaaattatcatttctcttttctgcttcattttatacatttaaaaaatacatgctgggtgtggtggctcatgcctgtaatagcaacactttgggaagccaaggcgggtggatcacgaggtcaggagattgagaccatcctggctaacacggtgaaaccccatctctactaaaaatacaaaaaattagccgggcgtggtggcacgtgcctgtagtcccagctacttgggaggatgaggcagaagaaacgcttgaacctgggagacagaggttgcagagagctgagattgcaccactgcattccagcctgagcaacagagcgagactccgtctcaaaaaaccaaaacaaaacaaaaacatatatatttacattatacatacacacaattacagaagtgaaaaatcacgcaattgatagactttatgtaaggtcttaaataaatgaaccatcccttaagaataacatcatctttgggaatgaactcatttaggtttactgtccattcttttttattttattattattttttgagacagagtcttactctgtcgcgcaggctgcagtgcaatggtgtgatcttggctcactgcaacctccgcctcccgggttcaagcaattctcctgcctcagcctccggagtagctgggactacaggcacacgccaccacgcccggctaactttttgtattttagtagagacggggtttcaccatgttgcccaggctggtctcgaactcctgagatcaggtaatccgcccgtctcggcctcccaaagtggtgggattacaggcgtgagccaccgtgcccggccttgtccgttattttctaaaagaagaactaaaaatcactacacaaagctgacacagctgaaaaagctggctttccaaatacaatgtggtcaaacaaaccttttacttccttcaagtactttctaggctcctcagtctcccaataccactgttactttctttttttttgagacaagagtctcgctccactgcgcaggctggagtgcagtggcacaatctaagctcactgcaagctccgcctcccgggctcacgccattctcctgtctcagcctcccaagtagctgggactacaggtgcctgccaccatgcccggctaattttttgtatttttagtagagacggggtttcatcgtgttagccaggatggtctcaatctcctgacctcgtgatccgcccacctcggcctcccaaagtgctgggattacaggtgtgagccactgcgcctggcctaccactgttactttctactgaaagtaattaaatatgttgaaatccctttttcatggtgctgctgggaactggggtacggatcagggtagtgtaatcaagcctttacacacctttacatgttaatcaagctatctttagggaagagaaagtgattttatgattggatctgtggtaaatttcagtaagtggcatatcctatgaatcactatctttttattacaagctaaaatgaataaccaacttaattcttaaactcaaaggaatactttttccaagtatcagttatgcagcccagagtaaatgatgttggcatcttttcactttattattctcattttacagatgaagaaactgagataccaagaggttagcggctgccaataaatggcagagccaagattaaaacccaggaagtcactccagagcctttatacttaaccaccacattatactgcacactctaagtgaaagttctgggcatataataatagattagaaaaaaatgtaaaatttaattaaaaaatttaaaagatgcaaagttatttacacttgtaaaaattctaggcatgagctaagcttacccggcatatgtccgttgatataaagattctggatccagacttgccgcatccacaattatcgcttcatcaaaatttttcagtattttaatactggcttttttcacactggactacaatagaaattgtaaaattagaagtatatgaaacaatcagtcctgggcttggaatgtgacagatttgtacaaaattttcttcagtgtttgaaatagaagtaactttcactcaacctcatcactattaagatgcttaacaacaatgactctgaaatgtaacctcatactatagctaaaagaggaaagcacaatattaaaatgtacatgccgggcacagtgactgaagcctataattcctaggttgaagtgcaatggcgcgatcacaactcactgcagcctcaccctcctgggctccaggactcctcccacctcagtctcagaaagtgctgggattacaggtatgagccaccatgcagccctcaatattcatcttttacccaatacaaggatcccagcactttgggaggctgaggcaggccgatcacttgaggccaagagttcgaggccagcatggtcaatatggtgaaacccagtttctactaaaaataaaaaaattagccgggcatggtggtgcatgcctgtaaccatagctactctggaggctgagacatgagaatcacttgagcccaggagatggaggtcgcagtgagccaagattgtaccactgcacgctggcctgggcgacagaggaagactctgtatcaaaaactaaaaaataaaataaaataaaatgtataatgtatgaatttataagacattcttaacgacctaagttccaacaaatgtgctgtactcacagcattatttcttcaatatgaaaagctgtcatacatccagaaatatgtatcttgggtagtaaagccccatgtttacagggtaaataggaatgtttttgattcttggtgaggccatatgacaaaaagaagctaaggaaacctttctaaaatgactagccagctgagtacagcaagttctcctccagcattctacctcctactccccacctccacaagaaaaaccagaattggtatttttgtgaaatacagagccataggttgacctagaaattccacttctaaaaattcagttacagagagacttatattgatggaaaatgacttatatacaagattattcactgcagcattgtttaaaataaaagacataaacaagcttaatgtccccgactaagtaataggttaagtaaataaaataattgaacagacacttatagacctctctatagcaggggtgggagggtagggaaagcggctctcatgtgttgagaaggaacaatctccaagatacacagttaaacaaaaaagaaagagggaccagaataaagagggaatatttcccaactaattctatgaggactgttactcagataccaaaatctcatttatactttctgatttcaaaacttattacaaagcaatagtaatcaagagagtatggtactggcataaagacagacatacagacggatgtatgtctatctttggaatggaagagaatcaagaacccacaaatacactctcacatttatggtcaattcatttctgatagagtgtaaatgttatcttaagcgttcagatacaaaatcttcaacaaaataccagtaaatggaatccagcagcatattgaaaagattatacaccatgaccaagtgagattcatctcaggtatgcaaggttggtttaacatctgaaaatcaattaatatttcacatcaacagaataaaacccaaaatccataggatcatttatactgatacagaaagaacatgacaatattcaacaccctttcatgatttaaaaaaaaaaaaaagccttaaaaaatcaggaatgatagggaaattcctgaatctgaaaaaaggcatttattgaaaacccacacctaacatcatattaaatgatgaaactgaaagctttccctgtcagataggaaacaagacaaagatttttgcttctgccacttctactcatcattgctctgtaagttctagccagaaaaaaaactatctctatccataaatgacatgatcttatatattgaaaatcctaaagaatccacaagaaaactattagagctaacaatcagatttatcaaagttgaagttgcaagatcaacatgtaaaaatcacttgtatttctatgctctctcatcaaacaatctgaaaatgaaattaagaaaacaattctatttataatggaatcgaaaagaacttaaaacataggaataaatgacccaaggaggtgaaaggcttctactctgaaaactacaaaattctgctgaaatgaaagaacacataaatacatgaagatacatccatgttcacaaattagaagacaatactgttaagaaggcaatattttggccgggtgcagtggctcacgcctgtaatcccagcactttgggaggccatggcaggtgaatcacctgaggtcaggagttcaagaccagccgggtgaacatggtgaaacactgtctctactaaaaatgcaaaaaaattagccaggcatggtggtgggtgcctgtaatcccagctactcgggaggctgaagcaggaagacactattaatagtgaaaagacaggttgcgtgtggctcacacctgtaatcccagcactctgggaggcagaggtgggagaatcactttgagcctagagtttgagaccaacttgggcaacacagtaagatctgtctctacaaacagaaaaaaaaagctgggtgtgatagtgtgtatctatggccctagctattcaggaggctgaagtaagaggatcacttcggcccaggaagttgaggtggcagtgagctgtgattgtgccactgcactccagcctgggcagcagaatgagaccttatcttaaaaaaacaaacaaacaaacaaacaaaaacccaccttttttaaaaggtagaggaaagacaactcacagaatgaagaaaatacctggaaataatataatttgataagggacatttatctagaatatataaaggactcctgaaactcaatataaaaaggcaatctaatttaaaaatgggcaaaggggctgagcaaggtggctcacgcctgtactccccacactttgggaggccaaggcaggaggatcacttgaacccaggagtttgagaccagcctgggcaatataatgagaaaattggctgggcctggtagctcatgccggtaatcccagcacttcgggaggccaaggcaggtggatcacctgaggtcaggagttgagaccagcctggccaacatggtgaaaccctgtctctaaaaaaaatacaaaagttagctgggtgtggtggtaggcacctgtaatcccagctactggggaggctgaggcaggaaaatcgcttgaacccaggaggcagaggttgcagtgagccaagattgtgccattgcactccagcctgggcaacaagagcaagactccttctcaaaaaaaaaaagaaaaaagaaaatctaggctgggcccaatggctcacgcctgtaatcccagcactttgggaagcctaggcaggcagatcacctgaggtcaggagtttgtgaccagcctggctaacatggtgaaaccctgtcactagtaaaaatacaaaaatcagcccggcatgctggcaggtgcctgaaatgtaatcccagctactcgggaggctgaggcaggagaatcacttgaacacaggaggcggaggttgcagtgagctgagaccacaccattgtactccagcctggctgacagagtgagacttggtctcaaaaaaaaataaataaataaaaataaaaataaaaatggccaaaggatttgaataaacatttttccaaagctagaacaaaggccaataagcaaatgaaaagatgctcaacatcattactcatcagagaagtgcaaaaaccacactgaagtagaacttattggaatgactatcatttttaaaaacagccaaacagataataagttccaatgaaatgtggagaagctgtaaaactcatacactgctggtgggattgcaaaatggtgcagccttttcggaaaacaatctggcagtttttcaataagtttaagagttacctcttgactcagcaattctactcctatgtatatacaacaaaagaaatgaaaaccacagccgggcatagtggctcacccctgtaatcccagcactttgggaggccgagatgggtggatcacttgaggtcaagagttcgagaccagactggccaacatggtgaaaccccatctctactaaaaaattagctgggcgtggtggtgcgtgcctatagtcccagatactcgggaggctgaggcaggagaactgcttgaacccaggagacagaggttgcagtgagccgagattgtgccactgcactccagcctgggcgacagagcaagactccacctcaaatttaaaaacaaaaagaaaacctgtatccacacaaaaacttgtacacaaatggtcacagtagcattattgataaatggcagaaaggagggtacaattcaaataaaatgtcataaatccttgcaatgggatatttggccataatgaggaataaaattctgatacatgccaaacatggataacatgatgctcttttgaacacatgatgctaagtgaaagacagttggcaacaaaagaccacataatatacggttccatgtttatgaaatgtccagaataagcaaatctattgtctctatagagataaaaagtagactagtggctgcctagggctggtggagtgggggatttggagtttaagtaaagggggtttctatctggagtgaaaaaaatgttctaaaatcgatgtggtaatggttacctaactctgtgaccatataaaaaccactgaattgtatgatgtaaatgtgaattagcacaataaagctgtacaagaaaagaatacacagtatggttttatttataaaatgacaagaacaggtaatgctaatctatgccatcaaaagtcaggatagtagctaccctggtgacaagaaggacagtgaatggaaggggcccaagagggcttctagaggggctgataatgctgtttttgatctggatgctgggtcacatgggttagttctgcttgtgaacattcttcaaggtgtctaaggttatgataagtgcagttttctatatatatagtatcaacaaaaggtataaaaatatattttatggttagtacctaggcctttcttaagtgcctaatcaaaaacaagacattcagccaggtgcagtggctcatgcctgcaatcccagcactttgggaggccgaggcaggtggatcatgaggtcagcagttcaataccagcctgaccaacatggtgaaaccccttctctactaaaaacacaaaaattagccaggtgtggttgcacatgcctgtaatcccagctactcaggaagctgaggcaggagaattgcttgaacccgggaggtggaggttgcagtgagccacgatcgtgccattgcactccagcctgggcgacagagcaagatgctgtctcaaacaatgacaacaacaaaaaccaaaaaaaaaaaaaaaaaaaaccaagacattctaacctatatcaaaaaaccaaaatggcaaccatactcagcagtttatctcctaggtaaacttaacagaagaaaaagatactcaggagagctttgtaaatggcaatacgataatactctcttacaaattaggaaaatttatccaaggcccagtattgaaaattcaaagggttatttatttgtcaacagtaattagaaaattattatgctacattaagctgatggtgaagaacactagaaggggaatatttctggctctatcatttactgtgtgagtttaataaaaccagttaacttctttatgcctccttagatttcttgtcttaggatattctactttgtgtgattttgaggagaatcaggtatggtttaacatatgaaagcactccaaaaaacccaaaaaaggtcaaggaaatgcacaatgtggcacggtaatgcaaaacgaaatcaaaaggccttgagtgaaacacaacattataggtagtggttcacgcctgtaatcccagcactttgagaggccaaggtgggaggactgcttgaagccaggagtttgagactaccctggccaacatagcaagaccctgtctctttacaaaaaaaaaagaaacttaggctgaagcaggcggcatttgaggtcaggggttcaagaccagcctgagcaacacagcaagactccatcatttaaaaaaaaaattttttttgagatggagtctcactctgtcaccatgcaggagtgcagtggcgtgatctcggctcactgcaacctccgactccctggttgaagccattctcctgcctcagcctcccaagtagctgggattacaggcatgagccaccataaccagctaatttttgtatttttagtagagacggggtttcaccacgttggccaggctggtctccatctcccgacctcgtgatctgcctgcctcggtctcccaaagtgctgggattacaggcgtgaaccatcatgcctggccaaaaaaaaatttcaaattagccaggcgtggtggtgcatgcctctagtcccagctattcaggaggctgtggtgggtggattatttgagcccagaatttccaggttgcagcgaggagaccctgtctcaagaaaagaaaaaaaaaggagacctaagaattcattcacttattttacaaaaagtatcctaaataaatacttacataaagagctcttcagaggctatgaatatattccatattacttgatttattaagagaaacagccacagattcaaatagaataatggcctaaatgaaacagcatgatactttacaatacagtatattttaagttaccacaaatgctttgattagaagatagtaagtaggctaattttatttctctcttttttttttttttttgagacacagtctcactttgtcacccaggctggagtgcagtggcgtgattttggttcattgcaacctctgcctcctgggttcaagcgattctcctgcctcagcctcccaagtagctaggattacaggtgcctgccaccatgcccggctaatttttgtatttttagtagagatggggtttcaccatgtcggccaggctggtctcgaattcctgacctcgtgtgatccgcccaccgcagcctcccaaagtgctgggattacaggcacaggccactgtgcctggcttttatcttttttttccacaacttaaaatttacaaataataggatctgttactgggatgtgaaggaaaggatgtgtatgcttttctccctaatggcagacgcaatcagtcaatacctgagacgcagagctgtcagaactccctgggtgagactcatcaggagggccaacagagccaggagcagtcagcgacacgttcccgcccagaaattcatctcctcgaaccgaatggatgagatcattcaaatatttataataaagattgctggacaaaaagccaggcaaaaagacctgatagagatgaaaagcattattttaaagttgaaatcaaatccaactaaaactgttttaaataaataaattttacctataattctactggttacaaatgttaactacctataacaaatgtttttacttcttgttgtactacaagtattatccctttgtacagtttacaaattaaaattataatgcataaggctgggtgcagtggcttacacctgtaatctcagcactctaggaggccgaggcagacggatcacttgagaccaggagttcaagaccagcctggccaacatgatgaaaccccatctctactaaaaactataaaaattagctaggcatggtggtgagcgcctgtaatcccagctactcgggaggcctgaggcaggagaattgcttgaacctgggagatggaggttgcagtgagccgagattgcaccactgcactccagcctggacgctggagcaagactgtctaaaaaaaaaaaaaaaaaaaaaattacaatgcatgtaattttgttgggttttctcccccaaaatatttgtcacgaaagtattacataaagttgatattaatactttttagcagaaaatagtccataggatataatttgaaactcgatttttctggtttatgataaatgttaaagtctttgtgcatatattgattttactttcaaactgatttccttaagataactcaccaggcgtgtgattgctgagttaaattttaactttaatatatatggtcactttactcttcaaaagaacattatcaatttcaatcactagcaatatatcaaaatatctgtttccacattgtttttttttcaaataattcttaaataaatgcctaattgtacatagatgtttttatttacatttaataattattaattatactgaatgagttctcatgtttattatttatatttctaattctacgaaggaaaagtttgtaactggacaagcaaataataaacatgagaacttattcagtataatttgtaaatatttatgttcgtatttaatacgtgcctttgttgtttgtttttgtttttttgagacgtattttcgcttttgtcccccgggctggaatgcagtggcatgatctcgactcactggaacctctgtctcccaggttcaagtgattctcctgcctcagcctcccgagtagctgggattacaggtgtccgccaccacacccagttaatttttgtatttttagtagagacggggtttcgccatgttggccaagctggtcttgaactcctgacctcaggtgatccacccgcctcgatcttccaaagtgctaggattacaggcgtgagccaccgtgcccggccaatatgtaccttttttgtagactaagctccaggatagcagaaacacatttattttgtttaccactgtaacactaccatctagcacagaaatactcaaagtttttgttgaatgaatcattcatgtcttttttcctacctaactaccagggtcttgacagtgttcttaaaattagtctaagttccttacatacacacatctagtaagaactatttttgcatttttctctctgcattttaattttattaccctgaaaatttacattctttatatgatacagatctgaacttttcctttaaaatcagaaaaggtttaattttaatcgtgaaaatattatcatcattgggtaacagctgacactctattctgtttactactagctatttaatgatttgacttctatatgtcattcttcagtattcctaaaattcagtttttatgtatggtattatataatagcgtttaattaagttttttcacctggatacacatgacacatacaagcaacataacctcactggctctgaaattcctggaaaaatctcctctagttcattagaagaataaatcattcacaaacatcaatactttacttttatttatttattataattatatttttgagacggagttttgctcttgttgcccaggctggagtgcaatggtgcgatctcagctcactgcaacctctgcctcccgggttcaagagattttcctgcctcagcctcctaagtagctgggattacaggcatgcaccaccacgcccggctaattttgtatttttagtagagatggggtttctccatgttggtcaggctggtctcaaactcctgacctcaggtgatccacccacctcggcctcccaaagtgctgggattacagatgtgagtcgccgtgcctagccaacgctttattattaataagctattaataataccttgtgatcataatacccaaaactagggttccaatcctgttgacagttactggtgatatatgtggatcatttctaagctaacgttgcggcataatgccttctttaattgttcaagacagggtcttgctctgtcaccaaggctggagtgcaggggcatgaacacggctcactgcagcctttaattcccaggctcatgcaatcctccagcttcagcctcctgagtagctggaactataggtgcatgccactacgcccagctaatttttgatactgctctctaattatttaaaaatacgtaataataatagtaataaaagtagttaacattttttgatgcttaccatgtgtcaggtactatgttaatatgtattttatatacattaccttactttaatcatcaaagtaactttgaggtaaacgtgcatattatcgtcactttacagataaggaaaatggcattagagaatttcagttactgcccaggcatggtagctcatgcctgtaatcccagcactttcggaggccaaagcaggcagatcacttaaggtcaggagttcgagaacagcctggccaaaatggtgaaaccctgtctctactaaaatacaaaaattagccaggtatggtggtgcctgcctgtaatcccagctacttgggaggatgaggcaggataattggttgaacctgggaggcagaagttgcagtgtgccaagactgtgcaactgcactccagcctggacaatggagtgaaactctgtctcaatcaatcaatcaatcaatcaatcaataaacagaatttccgttaggctgcttgccattgtgctaacatcacagagtgtacttatacaaacctagatggtatggcctactacaccccttggctatatggtacaacctattgcttttgggctacaaacctgtatcacatgttactataatgaatatcgtaggccactattgcaatggtaagaatttgtgtatttaaacacaaatacagaaaaggcacagtaaaaatacagtataaaagataaaaaatggtacatctgtatagggcacttaccatgaatggagcttgcaagactggaagttgctctgggtgagtcagcgagtgagtggtaagtgaatgtgaaggcctagcacattattgtacactactgtagacttacactgtacacttaggctacactaaatttatttaaaatttttttctttaataataaattagcttactgtaactttttaactgttttactttttttagctttttgactctgttgtcataacagcttaaaacacaaacatatacagctgtacaaaaatattttcattatatccttattttataagcttttttctatttttaattttttttttctttttaaatttgtttgttaaaaactaagacaaacacccacattagcctaagcctacacagggtcaggatcatcaataacactttctttcacctccacatcttgtcccactggaaggtcttcaggggcagtaacacgcatggagccgtcatctcctttgataacaatgcctccttctggaaacctcctgaaggacctgtctgaagctgttttacagttaactgttttcttagtaagtagaaggagcactctaaaataatgattaaaagtatagtacagtaaatatgaggcaacagagatttttcagctccattataattttttttgttttgttcttggttattcttttatctttttagtttttcttttttcttttttacttattaaaatttattttttctaacttttgttattattgcactaccagctttgatccattataatcgtacaggaccatcgtacacgcagtccactgttgactaaaatgttatgtggcacgtgactgtacataccaggccagactcaaggcctctgctcttaatcactttgctggactgcttcaatttccactgtgctattctgcttggttttcccaccttatattttatgagttctaccaataaaacttcttgtagtttgatacgtttgaagttctgggttaccttctccatggttgtccaggcctgacgtaatggagttgtgaaacagttggggagtggcccaccttccctgcagatattggattcaatttctaatcgtacaacatcatcaaatccaagaggatgtgtggcttggagggagaagtacctatggtaaaaagatatccgaagtaaaatcaaattccatagcaagtataagcaactttcagcacctcctccagagaatcttatacaaggctacttgattgagcctgcaggcctagaactatagagctatgtgatgacagtgctgatgtaacctttctttgttcccacttccccagagatagttgggtcaacttgctacctttctatctgcctgccaaccatccttagttcttgacggtgaactctactgttgtttaaaagctgtaaggatcagactacaactgaggcaaagaaactaacaatcacatatttatgggtacctattctctgttgaggacttgatagatagaaaggaatttataggaaaggaagacatggtcattttccctaaaaagcgagctgagaacttgtatgcacagaataaaataagaacacatcatcataactacaaggcatcaggagtaaacatgtacaaattcaaaacaaaacagcactgaggggtgagctagatgcatatgacctatttggatagaacaggacttactgatgactcggtgtggaaagggagtaaccaatattgataacacaaagatttctaccttgatggggtataatgcaggtaatgttttggtaagctgattatgaaatgaataccaaaaaaagcattaaatgcgagaaaaaaaaaaaggctctcttccaagcactctaatggtttctatgtcctgacagaaatacaaaggttgataatgcatgattatgatgatgcatatatatgatacaaaaacaagcaggctgggcacagtggctcacgcctataatcccagcactttgggaggcagtggtgggtggatcacttgaggtcaggagttcaagaccggcctggccaacatggtgaaaccctgtctctactaaaaatacaaaaattagctgggcgtggtggcccccacctgtaatcccagctactcaggaggctgaggcaggagaaccgcttgaacccaggaggtggaggttgcagtgagctgagatcgtgtcactgcactctagcctgggtgacagagcaagactccatctcaaaaaataaaaaagaagaaaaaaaagaaaactctccttttaaatcagcatttttgtaacaaaatgtgaatctcctatgttgtattgagtaagttggtcaatactcctccacgacttgaatgttcaggcattttagaccaaatttctaaatgtaaactcttcctatctcaacatctatataacaatgtttcttacgtaataccttctacaaacatactgtaccagaataaacactggacagaacattaagaactgcattccagtccaaattctgccactaacttgttctgtgactttgagaaaatcattacctctctgggccttattttccttacttgcaaaataggaaaattagactacatccctaaactggctatttatcagaattatctggtatgtcttctaaaaataaagattcctggtcacacctcaaacctgcagaatcagaatttctgagacagggggactggaaaccttttttttttttttttttttgagatgcagtcctctgcctcccgggttcaagcaattctcctgcctcagcctccctagtagctgggattataggcacccgtcaaaatgcccagttaattttttgtagtttctagtagagacaaggtttcactatgttggccaggcagttctcaaactcctgacctcaagtgatctgcctgccttggcctcccaaagtgctgggattacaggtgtgagccaccggtacccagactgaaaacctatttttttttttttttctgagacagagtctccctctgtcagccagcctggagtgcagtggcatgatctccgctcactgcaacctccacctcccgggctcgagcaattctccttcctcagcctcctgagtagctgggattacaggtgtgtgccatcatgcctggctaattcttgtatttttagtagagacggggttttaccatgttggccaggctggtcttgaacgcctgacctcaagtaatccgcctgcctcagcctcccaaagtgctgggattataggcgtgagccaccgcaaccagcctgaaaacctatttttaataagctctcaggtgattcctatgcagacagcccagcaagagcccacagactaatgttcaggaaccactggcctagatactattagtgtcttcaaaccctaacatctgtggacttttctctatccccaagttacccctttagcatttgcttaaggatacaaataacaaattacctttgttgttttttttttttttggagacagggtctcactctactgccctgcccagggtggagtacagtggatcacagctcactgcagcctcgacctcccaaggctcaggtgatccttctgcctcaggcccctaagtagctaggacaacaggcgcacgccatcacgctcagctaatttttgtatttttagtaaaggcgggttttgccatgttgcccaggctggtctcaaattcctgggctcaagcgattcacctgcctctgcctctcaaagtgttgtgattacaggagtgagccaccgtgcccgaccacgaattactttttttacagagtaagaaaagttaaatgaaaagaataccatacgttacagagctggccacaagctcatcatctgcctgaccagatattttcaattttgtttactgtatgatgtttccatcctctcattttcagtgaaaactaataaaaaactaattaacaacgtgcctgagcagatttatacagaaagtataatatacccataaataggcattcaaggtcccttacaatctattccaattagtaccagcatcctcatatttattccccactcctttgattatctaaactcaagtttcttgaaagtgccactttcccctacgtttccatggcttctgggccaatgcctttgcctagaatgttgttttctgccttctctgggtagcaaaattcccttctttctttgggatccaaacaaaatctctcttctgggaaacactccttgaacaccaccattgccatcctgtttaccccacatacacctcccctttcccagcagaaacttttgttctaagaacccccaaagctttacaaacaccatataaaagcagcttttatgctgcctcctgtgagctccttgacaacagagactgagtttattcatctttatttccacaaaacatatcaaatgttcaataagtatctgctgaatccatctatcaatataactcacttgtcatataaaatcatggcatcattctgtgcctcctgtccatcatattggccctttttggcagcaagctgagactggaagttatctgctgccaaccagaattgtaagatattcactgcatcctctttttccatgtactaggaagaaaaaatacacaagggaaaataagactataaacagatttctctcacaatctctaatctataagctcaaatattaaaatacaggtcataagcaaaaaacaaaaagatctacttcttctgttaacacctgtcagcaagttacagtcatttgagattgaaaagttttaaagtattcttttagacgaaaaaaaagttaacaagaaacaaacactacctacacagctggatgcaaacttttagtgaactagagtaaaaattatactaaactggatttgtggttccttgccagcaaacatataaagagtaaactaaccaaaccaaatattttatatctgatcatttccaccattccatgaggacatattaacctaaacaaattgttgatttaaacttatagcaaagaaagggagtgagaaaacaaatcaactgagtacctgtattcttgtaaagaggcagaatcgagtgtctaaattactgctttgtgagactgggaatcctctttctacttaatagtcatttgctttccaacaaaataatttcacttgttgaagcctaacaaagagcattatactaaactgtatgcctcaaaaagattaatatactcattgtctgttgcaaatgcttcttcactgggcaatcctatcaagtgactaaagtaaaaatgatgagcataagaaaaaatttactactttttttctcttctgaagtctggtctgcaatttatgcactggaagcaagtttcaaattctgtggttttaaaatagctccaaataattaaaaacatgcactctcttacatgcagtagtttaattaggtttctcaaaattagagttatttaatacattgaattttcatgttctctctaatatattattaaattactcttgccatcagaaacaacttgaaacaatgatacatctttttggaaatgacttggctcttctgtgttatttcctatagacagggccccagcattgatagttagaggctggaatgctcgaatagagtgtgaaaagaaatgcagactttacctcagagaaataaaagagggctgactcacagaagagaatgtcagccaggtaaacagttccactggtcagcacttcaatctggtatttacagaaatggtgacttcgcagaaactcactaaagtgcctgcacatggacaaaagggaaaatttgagggaacgaccaaggaaagagtttaagtgggaaaaatatactctttccatactgtccctattgtatcttaaaggcctaggtcaacactaccttactccccatggtgtcattcctgattcctttacctgtatgtaatctctcccacctttttatgactttgtagttctcccctgacatttaacacatgccacttcatattacagtaaccaaacaacatgccctatgtcttttattaggctgtaacttccttcaagactggcactatgcctaaccacgtcttacacagagcactcttctgataaatgttaagtgaaagaatgaatagattttttttaagggcacatagcagtaataaatctaaaaaacctctggagccatttcaacaaatctatgtggatttagttatatagcatccatttagcttaaagcctaactaacaaattaggagagccatctgaagacatgcattatttaaataaataaaccaattctaatagtcataatcactacagactcaatcactccccaaattatttcagaactaaaaacaaattattttaacttaggaaatattaacattgaaaatgaaaatgaaaattttaagagttcacataatttatatttaaaagaaactgttaaccaagatagagtatgctttatatgatcttgtaaatatccaaaatatttaaattctcaaaaatactttgtttttagctgagtgaagcccattcctaacaatgaacccaaattccctaggatgcacaatgtgaaaatatgaactaacttactcttgctccattgcactaaagactatggactgtgccaaaacgaaacagttgggatccacctgtccatcttctccacaaatccttgctgcaaaagaagttgtaaataattaaattgccactaaattcaaactatgtatacacacttgtgaatcaacttgggagttaacagcacaggcatataaattaagaggttttaaatagaactaaaagaaaatacaggtaacacttgatcttaaaatagaaagtcttttgaagtacatatgcaaaagcagaaatcaaaagatttaacaacataaaatttaattcctatacatagaaaccctccaaaaacaaaatacaaaggcaaacaaacagaaaaaagatttgcagcatgcatgacagttaaaaggttactatcattaaaataccaagagctcttataaactactaagaaatgttccaaaagaaaaatgagcaaaggacatgacaatccacaaaggaacaaacataaaatgaccaacgtgaaaagacatacatactcactagtaatcaaatagattagaataaggaggcactacaccttttatctagtaaactggcccaacattgtttttaataatatgtatacttgagcaagggcacaagaaaactaacactagtgttagtggggatacaaacacctttttctgaaggcaatttggcagtttctagcataactttaaaaatgaacataccctttcaatgagcaattctatttctgggattgtaacttaaaaaattatggatttgtgaagttatctgtaaaaaagtttattaaaatgttattggtagaaattttaaaacatgaaatgtgctaaaataaggaactgctaaaataaactgcagcgaaacaattagctatttagctagctgttaaacatggctggaaaaaccatataacatgatgcctagtctcactttgtgttcatgactttagtgggaccttcatgaaaccaagggatcatactagtgtcctggtctgtttacattcactttcctagacaatacaaatctgtgatactgtgaaatatgttatttagtctttgcccagttttttttttttcctttttcttctgagacaaggtctcactttgtcacccaagccggagtcagtggcacgatcatggctcactgctgccttcaactccagggctcagtgatcctcagccttctgagtagctgagactacagacaagagctattacgcctggccaatttttaaattttttgtaagggggtctcactatgttgaccaggctggttttgatctcatggcctgaaacgatcctcctgcctcagcctcccaaagtgctgggattacaggcctgagacattgcaactggcctttagccagtttcttagcatacagcgcctaaaattcatggaatctctggattcttttgaaggctaatgagatgacttgtggctgtggcctctaaagagctttaggatgagggctaatcaccagaaagaccaaggcagaattacacgtttgggactttcagccctacccaccaacctcccgggatgagggggctgaaggttgagctgatcaccaatagccaatgatcaatcatgcctatataatgaagtctccacaaaaaacccaaaaggacagaatggggaggggggcttctgaatagctaaatctgtagaggttcttggagggtggcatgacctggagagtgcatggaagctctgtgcccctctcccataccttgcccatgcatctcttccatctgcctgttcaatctgtatcctttgtaatatcctttataataaatgggtaaatatatgtaaagcatttccctgagttctgagagctgctctagcaaatttattgaacccaaggaggggactgtgggaactccaatttatagaaggtcagtcagaagcacaggccacaacttgtacttgagactggcatctgaagtggaggcagtcttgtgggacagagtcctcaatctgtgggatctgatgctatctccaggtaaacagtgtgagaactgaactgacttagaggacacccagttggtgttcactgaacaatcatctgcagaattggtagctgacagggaaaaaaccccacacaactagagtcatggaagggttctgttttgtgagagttcagaaggagaaactgagttttttttttttctacagtacatctcctttctcaaatatttaacacctcttctattctctttgctgaggactttgcttcctgcttccttgagaatatagaagcaatcagaaaattatttccatcatctctcacatctttcaactcacctgcatctctacccgtgtactgcattctttcctgtgactctagataaattgtccttgctcccatctaagcaatcttctatgtgagcactggaattcatcccttctgcctccagacttctttcctgtaacaactgtcccctctcctacatcaacttctccttcactactgcctcattcctatcagctgtgtggactgcatgtttatatatatacctgtttgtatgctataacacactttatatgcttatatatatgcctgtaacctcagcactttgggaggccaaggtgagtagatcatgaggtcaggagatggagaccatcctggccaacacggtgaaaccccgtttctactaaaatacaaaaaaaaaaattagccaggcgtggtggcgagcgcctgtagtcccagctacttgggaggctgaggcaggggaatcgcttgaacccaggaggcggaggttgccgtgagccaagatcacgccactgcactccagcctggcgagagtgagactccgtctcaaaaacaaacaaacaaacaaacaaaaaatgcagtcatgctttattcctttttttccctctcataccactcacttccaaaccatcagcaaattctgtcagctgtaccttcaaagtttttaaaaattctaccacttcaaacatttgtggaagatgaaggaggtagtgcaagtatagattctggatcactctaaatcctcacataaaaacagtaattagttagcaacaccaaaaatccaaggattacatttaaaacaagactatgcaaagtgggtacacagtaagagctaaagtgaaggctcctttgaacaaaactcacttgaaggacagctatattaaaatagtccaactgcaagaggagacaaataatttggacaggattaagaatggggctcaaggaggaaaaatgacttgcctaaagccacacaggtaattaacatcctaaaatatataatgatagacactgggatagaggttttctcaaattctttgatcacaaaatgttatcaacttgatccttcagaagacttttccttcatgggattacatcatcattaatttgattaagcttaagtaaaagaaagagagttgcagtgtggtttcattttaagtgttttatttgacttgaaactgcttcctttttatccacacgccagtcaggctattaactggtacagactcccctcaaaaaaaaatcactagccaaccaattcttcaaacaggcaaactctaatcagtcagaacatccctgttgtattactaggaaaagctggtctagggatgatgatagtagcaaattcccacataaaaatagagcaacaacacagaaaacctcaaatctcatgacaacatctgtcagcaaaactcagtgaaacagtaccccttaaatacaagcagatagggataagccaccaacagccaccaggcctatgttatagccgttataggtatctgtgtgggagaaagaaaaggaaaatggagccaacatgacatggaccccagaatagctaactggaaggtacagtgggccaatttaagaaacacagctgagactaacaggggtcttgctgtccccagcagtgagtgagtgcaaagcacccacactaaggattaaagaagcccaacatcgggacagatctgctaaaagtgcaagaacatgtcttatttcataaatcacaaatactaacttttttgaagaataaaaatacataatattaggacttatgagaatgtaatatttattgaatgaataaataacctcttttatctgtgaatatacgttcacctaaggtcttcctgataaaacacagtaaaagctttcaaactattttgctataacctataagaaatatatttgttgaatcagcatacacatacatacatgtatatataatgaaaacatttttctgaaatgtttgtccttactactctgagatactttgatttttttattctagtatatatatatatacacacactaatatgtatattatatattagtatatatactaatatataatatatactatatatgcatatatactaatacatatattttatatatatatatattttatatatatatatattatatatatatatatatatatatatatatatatatatattttttttttttttttttttttttggcagggggtgagggcataagagaaggctggtcccaacctacagtatgaaaaacactgccacagcacagcagttaaggtatgtgagggtctagtttcaaatcctgactctgccatatctgagctgttaccctggacaaagcacttaacttctctgtgcttcagtttcttcatctataaaataactgtatttatcccacaaagttctttagaagttaaaatgagtctatccataaaaagtgcttggaatattgtctgggacacagtgagtgtttaataaatgtgtactatttattgatcttgctgtcattgttattcaggttaaagcctaagaatttgggtccaacatataagaaaaactttttttttttttttttttttaaggttagcaaattgtctttattcagaagaataaagttacgtgaaactgggactggacatgaggctgccctcctccttgcacctccagctgtgccaaatgacacagaaatgacactgtgtgtggcacaatcaactggcaaaaaaaggcaagtcacaggccatgtgatggctctggctaatgcaggtagacatccagggtgcccagggacgtcaggcccactgagaagtgggatgaagccctgagacggagaggccaccactgagacacctgtctggccatccagttgcccactggtcgtgagactcttgggctgcagccctgatgcctagagactttggtaccggcttttagcctcactggacttccaaccccagaagtttctgtcccgcccacttcgtgcactggtgcggggctgccggccagtccatccggtggtctgtgccggttagcgtagccgcccgccggcccggctgctcagcagcgggcaggcctgagcacccgctacactgcagcccatctggcccaggcaaagaccctcgcaccgaatgcagccgagaaacttttaaagtgagctataatccgatataaaaaatactcagaaaacaaattaggaagggaactgctaaattccatgttaagaaaaaattatcttagtcaataacgaaaattgtcagttctgtgcattttttgtcattttttttttgccatagtttcaagcactgcttacctatgatgtcatttctcattgcttctgtaattggtattggtttagcagcatctggagatatatatttggtaaaagtattcactgcatcttgttctatacctgcaagggaagaagagaacttcaaaaaccaaaaagcaacttggactccagtaatgaattatattcatgaatagcagggcttagatcactgtgagttcctattgcaaaataaacttccatcacaaaggtgctttttcattgtttggtttgtggaagaggagagttacatgggggtgttcaaagctatggaaaatgcatatgatgaaaaaactatgcatgaatttcaaagtacttttacaccaaaataaactcatattaacctgttataacgtatctgaacaggatctactctgaggcactaagaaggagaaaacatcagtttgaagacagcccctattggagcaacatgaattctgctaaaatggaagaataaacatcaaatttatggtgaagcttgtgtggatgaaagataaaattattgatgctttaccaaaagtttatggggacaatgcctcaaaggacagagtgagactccgtctcaaaaaaaaaaaaaaagtcaagtattaataattatgacagaaaccaccaaaggcgggtgttaaagtgttattttcctaatgtgcttgctaaagggaaaacagcaaattaatatagagaatatcatccgttgatttgatatgaaatcctaataagtatgtcaagatgaaataagcacactcttctgtctctcccatggaatgcaactcaaaacaatggacaaatgcatccaaggacttggaagcaggtggactgagaaaagtaatcagaacttgcagtacctccgtactcctgacaagtttgtccagcacctcctggcctggactcaaaagctgaaactgcacaccagatgcacaaagaagaagttccaagacaggccctctatttctggtctgaggaacaggaaagggggctctcacggatcaaagagagtggaggaaatcccctgggttgttttgttttgttcctttctctccttcgactcccaggcagcatcagagcagccacagcagcaatgacagcagctccaagaatcctactttctgacaagagaaactgcagtcccaagaagaagaagtcgtggccacagaggttgacatagctacaggaagtgtgctgaagtatagggaatctaaagccctgactttctagccagacaacaggaaagggataaagggaggttcttagaaggcagaacgtgtcagggacatcacagaaaagaaggagcccatgaaaacgtcgagttgtatgtgcactcccggggccactcgtgagctgggtgtgcatggccctgcttctaaaagtgtacaaaggctttgggacctgaccattggccaggtcccagactggacacagaaaggcacataagcagataagatacaaaactgaactgatgatggaaccagagccgacagaatgctgcttagaatttgtggactgaacctaactaggtcaactgcttgttaaagcaaaaacttcaatattttccacaggatttaaacaagattcagaatcatgtaacgtaagtcaaactgtccaagatacaatccaaaattaattgtcatataaagaaccagaaaatcccattatctcacaagagaaaagacaatcaagaggacacatatgctgggatgataaaacaaattttaagtagctactaaaaccatgctctaagaaataagatcactcctgaaacaaataagagtttcaggagcaaagtataagacatacacaaaaaaagaaaattttagaactaaaaaacataataaacaaaatttaaaattcactacaaagactcaataacagaatggaaataacgggaaagaaccagtgaatttgaagacagatgaatagaaattttcgaagctgaacaacaggaaaaaaaaatttaaagaagtaaggaaagcctcaggaacctgccaaacaataacaaaactaacatttgggttactaaaatcctagaaggaaaagagaaaaagtgcaatgtcaaaaaaatatttaaagacttagccgggcgcggtggctcacgcctgtaatcccagcactttgggaggctgaggagagcgaatcacaaggtcaagaaatcgagaccatcctggccaacacagtgaaaccgtctctactaaaaatacaaaaattagctgggcatggtggcgcgcacctgtaatcccagctactcagtaggctgaggcaggagaaacacttgaacccaggaggcggaggttgcagtgagccaagatcacgccactgcactccagcctggtaacagaaagagagactctgtctcaaaaaaaaaagagaaaaaaaaaaaaaaacggtgttattaaatctttattacatttcttttctctctcttttttaacctcatccctagttctatttttatggtggttaagttttctacattccacttgaagttacaaaatattaaatgtgagtacactgtgaaaagtatgtatattgtaattcctagagaagccactaaaaagcctacataaaaagatacaatcaagaactcaatatataaattctagaaaaaggcagggcatggtggctcacgcctgtaatcccagcactttgggaggccgaggcaggtggatcacttgaggtcaagagttcaagaccagcctggccaatatggtgaaaccctgtctctactaaaaatacaaaaaaattagctgggtgtagtggcacatgcctgcagtcccagctacttgggagctgtggcaggagaatcactcaaaaaaataaataaataagtaagataaataaatttaaggaaaaattcaaataatccaaaagaaagcaaaaaaggggctctccctcgtctccctctccctctccccggtctccctctgatgccaccaaagttgtgaaagccgaggctggactgtactgccgccatctcggctcactgcaacctccctgcctgattctcctgcctcagcctgcagagtgcctgggattgcaggcgcacgccgccacacctgactggtttttgcattttttggtggagacggggtttcgctgtgttggccgggctggtctccagctcctgaccgcgagtgatctgcctgcctcggcctcccgaggtgccaggattgcagacggagtctcgctcactcaatgctcaatgttgcccaggctggagtgcagtggcgtgatctcagctccctacaacctccacttcccagccgcctgccttggcctcccaaagtgccgagattgcagcctctgcccggccgccaccccgtccgggaagtgaggagcgtctctgcctagccgcccatcgtctgggatgtgaggagcccctctgaccggccgccccgtctgggaagtgaggagcacctcttcccggctgccatcccgtctaggaagtgaggagtgtctctgcccggcagcccatcgtctgagatgtggggaccacctctgccccgccgccccgtctgggatgggaggagcgcctctgcccggccgcgaccccgtctgggaactgaggagtgtctctgcccgaccgccaccccatctgggaggtgaggagcgtctctgcccggccgccccgtctgagaagtgaggagcccctccgcccggcagccgcccggtctgcgaagtgaggagcccctcagcccggcagccgccccgtccgggagggaggtggggggcagcccccgcccggccagccgccccatctgggagggaggtggggggtcagcccccgcccggccagccgccccgtccgggagggaggtggggggtcagcccccgcccggccagccgccccatccgggagggaggtggggggcgcctccgcccggccactgccccgtctgggaggtggggggcgcctctgcccggctgccccatctgggaagtgaggagcccctctgcccagctgccaccccgtctgggaggtgtacccaacagctcattgagaacgggccatgatgacgatggcagttttgtcgaatagaaaagggggaaatgtggggaaaagaaagagagatcagattgttactgtgtctgtgtagaaagaagtagacatgggagactccattttgttctgtactaagaaaaattcttctgccttgggatgctgttaatctataaccttacccccaaccccctgctctctgaaacatgtgctattaccactcagggttaaatggattaagggtggtgcaagatgtgctttgttaaacagatgcttgaaggcagcatgctcgttaagagtcatcaccactccctaatctcaagtacccagggacacaaacactgcagaaggccgcagggtcctctgtctaggaaaaccagagaccttgttcacatgtttatctgctgaccttccctcaactattgtcctatgaccctgccaaatccccctctccaagaaacacccaagaatgatcaacaaatactaaaaaaaaataagaattaaaaaaaaaaaaaaagcaaaaaaggggaaatcaaagagggagaaacagaaaaacatatactaaactggtaatctaaatccaaagatattaatattattatgagtaatataattatattaataccaataattatatttacacattataaataccccagtgcaacagttacatttaatgtaaataattatactaaaatttatattaaaataattaaatttaccaacaaaaaccctgtattgtgagaaaagattaaaaataacatgactcagccgggtgcagtggctcacgcctgtaatcccagcactttgggaggccaaagcaggtggatcacctgaggtcaggagttcaagacgagcctggctaacatggtgaaaatccgtttctactaaaaatacaaaaaatcagccaggcatggtgcgcgtgcctgtaatcccagctacttgggaggctgaggcaggagaatcactgcaacccaggaggtggaggttgtggtaagccaggattgcaccactgcactccagcttgggcaacaagagcaaaactctgtctcaataaataaataaataaataaataaataaataaataaataacactacccaactatatgctgcctacaagaagccccctttaaatagaattataaaggtagatcaaaagtaaaaaaatggaaaaagatatgccatgcaagcactaatcaaatgaaagctgcagtgtctatataaattggacaacagatatttctgatcttagaacaaggaaaattaccataaagagggaattacataatgataaaacaggcaattcacccagaagatatcatcctgaatgtgtacacacctaacaacagagcctcaaaatacatgaagcaaaaccagatagagctgaaagtaaaattggaaaaaaaaattgtagttggaaagttcaacactcttctgagtaataaagtgatataactgcatacaaagtatcagcaagaataaagaaaaactgaacaccatcattaaccaactaaatcaacttgacatttatagaaaactgtccaaaaacagaatgtacaatctttatactgtatgtggtatattcacattttaaaaaattttttaatgttatttttaaaaattaataaatgaaatcattcaaaatatattctctgaccataatataatgaaatgagaaataaatggtagaaaaataacaggaaaaaagtctccaattgcttgcaaactaaataacatatttctaaataattcattggtaaaagaataagattcaagggaaattagaacatttcatttgtgctcagttcaaaataccagaatttgtgggggtgtaactaaagcagtggttagaaggaaatttacagtattaaatgcttatcttagaaaagaaaggtctcaaaccagaaatctaagtttctactttaagcaacttggagaaaaaaaaaagagtaaaataaacccaaagcaagcagaaataatagaaaagaaataataaagagcagaaaatcaataaaattgaaaacaaaacaacagaaaaatcaaaacaaaagctagttctttgaaaagactaataaatccctatacaatctgacaaagaaaaacaagacacaattgccaacaccaggaataaaagagggataccactacaaacccgaaatgctataaataattacacgctcataaatttgacaattcaatacaattaattactcaaaggccataaactacagtaaaaattcactcaagaagaaacagataacttaaatagtcctatatctattaaataatctgaattcatagtttaaaatactctgaaaaagaaaaccctaggcccctgccaggcacggtggctcacatctataatcctaacactttgggaggccaaggtgggctaatcacttgaggtcacaagttcgagaccagcttggctaacatggtgaaaccctgtctgcattaaaaatacaaaaattagtcgggcatggtggcacacgcttgtaatcccagctatttgggaggctgaggcaggaggataacttgaacctgggaggcagaggttgcagtaagccaagatctcaccactgcactccaacctgggtgacagaagtgagactctgtctcacacacaaaaaacaaaaccctaggcccagatggcatcacttcccaattcaaccaaatatctaaagaagaaatgacaccaattctacacaatctcttctagaaaatggaaataagagtaaaaataaaaacttcccaattcgttttataaggccagcattacccaattttaagacttactatacagtaattaagaccatgtggtattaacaaaggaatagacacacacatcatgaaacagaaaaaggagtccaaaaacaggcctagacaaatatggcaaaagtacaaaggcaattcaatggagtaaaggttgtcttttcaacaaatggtattagaacaactagacatccatatgtaaaaataaacaaaaaacaaaaaatctgacgtaaccctcatacttatacgacattaactcaaaaaagatatatatctaaacgtaaagtgtaaaaccataatactttttttttttttttgagatggagtctcactgtgttgcccaggctggagtgcagtggcgcgatctcggctcactgcaagctccacctcccgggttcacactattctcctgcctcaacctctcaagtagctgggactacaggtgcccgccaccacgcccggctaatttttttttttttttgtatttttagtagagatggggtttcaccgcattagccaggatggtctcgatctcctgacctcgtaatctgcccacctcagcttctcaaagtgctgagattacaggcataagccatggcacctggccaaccacaatacttttaaaaggaaacatatgagaaaatcttcatgacctttgcttaggcaaagggctcttaggtgtgactctgaaggcacaatccatacaagaaaaaaatgacaagttgaatgtaaatttaaaaaaaaaaagtcctgattgggcacagtggctcacgcctgtaatcccagcactttgggaggccgaggcaggtggatcacttgaggtcaagagtttgagaccagcctggccaacatggtgaaaccccatttctactaaaaatacaaaaaaatcagccgggtgtggtggtgcgtgcctataatcccagctactagggaggctaaggcaggagaactgcttgaacccaggaggcggaggttgcagtgagccgagattgcctcactgcactccagctcgggcgacagagcaagacgctgtctcaaaaaaaaaaataagaaaaaaaaagagaaaaggcaaagctattgagacggagaaagatcagcggttgccaagtgttgggatagaggtggggcttgacttcaaaggtgaaggaactaactgttctttacccttatagtggtgacagttacaggaatctatgtatgtgttaaaactgatacaagtatacattttaaaaaggtcaaacttactatatataatatttgaagataatgaaaaagggaaaaatgtaactaatgctcttttaataactccactgctatttctatttttattgaaaattaccactaaagcaaagacagtttctaaaaacaataaatgtattacaattacagaaacataatcctagcactttgggaggctgaggtgggcagatcacaaagtcaggagttcaagaccagcctggccaacatggcgaaaccccatctcttctaaaaatacaaaaatcagccaggcatggtggtgggcacctgtaatcccagctactcagggggctgaggcaagagaatcgcttgaacccgggaggtggaggttgcagtgagctgagagtacgtcattgcactccagcctgggtgacagagtgagactccatctcaaaaaaaaaacaattacagaaacagactttggacttccatttccagaaacaggttagaaactcttcccaatactgaattctctcaaaatgttttttaaaaaggtgagtttgtgttaaactaaggaaaatagtgggaggcagaaacaaatacaggcagtgcccttatcttaaacatttggggccagtagtattctggaattcagaattttggagttttacagggacaacacattaagtttaacagagagcatattaatactccagcaccatctgggacaataccccataatcaaacaccatatttctacagtaagtataaacctgtactcatacaggatcagtacgagcacccaagacaaaaattcagttttaagtggtaccagaagggtagtgacccaggccccaggtgcatggcaaaagaaaatgcaaaacacctgaagtaacttaatttatacagagtacacagagaattcccacagacaaaagtccaagaaacatgttcacggccaaaaatcactaaaatcacaagccaccaacagtctgaatccgaagaaacaaagaaatgctgagtcaggtccacaaaaaactgtagatagcagaattatcagacaaatatacatttaataaaactaaataaataaaagatgggatcaaaagtgggaatgaagggtgaaaggaataagaaactacaaaaaatgatccatagaaataaaaaattcaataactttttttctttgtttgagctggggtcttgctgtgttgcccaggttggtctcaaaactcctgggctcaagcaatcttctcaccttaagcttcctgagtagctgggagtacaagtgtgtgccacttctcccagcttacagtaactttgcgatgaaaataacatgccgtcaggtgtggtgattcatgcctgtaatcccagcactttgggaggccgaggcaggtgggtcacttgaggtcaggagttcaagatcagcctgaccaacatggtgaaaccccgtctctactaaaatataaaaattagccaggagtggtggcgggcgcctgtaatcccagctcctcgggagcctggttgagggaaggaaggagggagggagggaggaaggaaataacatgctgaaaacttgattcagtagcagattagacctcattttagttcactgagaatgagtgaactaaaagatctgaagaaatcacttagccctttaagacacaaagaacatttaagatgaaaaagaacatgaaggctgtctaatcaaaatcccaggtgataattaagagtatataatttctaaactaatagagaagaaaaaaaaacaggtgctcttgtcaaaatgcttctaggtccacatttactgtacaacctagaggaagttacctaacctttctaagccctggttttctcatgtgtaaataagataatcagtccgggcgcggtggctcatgcctgtaatcccagcactttgggaggccgaggcaggcggatcacaaagtcaggagatcgagaccatcctggcgaacatggtgaaaccccgtctctactaaaaatacaaaaaaattagccgggtgtggtggcaggcgcctgtagtcccagctatttgggaggctgaggcaggagaatggcatgaacccggaggttgcagtgagccgagaccgcgccattgcactccagcctgggcgacagagcaagactccatctcaaaaaaaaaaagataatcatgcctactacctgcacaaaggtcttgtgactaataaataaaatccaaatatacactaagcactgaacttaataaatgtcacttattggcaatttttaaaaattttttaaaaattttatctgcaaagtgcagtaaaatattaataaaattaagaccgagggaggaaataaggctatgtggataatggtttgatgtcaaaatcagtggaggggaaaagtaggacatttgacccttcatttactaattctgataacacacttcttagaaggtccagtcactcctgctccttttccatacactgatctgactctactacactctccaaattctcccaaatttacaagtagttagaggagaaaaaaaatattccaatcattttattcctcatctgaagttctgcttagtaaattaaaaaaagaaagtgagacacatatgtacacacaagaaaatcacatactcacttttcattagttttcctgacaattcttttagtggagaagcgggactatttctactggctactgtaagtgtagaggaagattcttgggtttccatggaaacttggtgagttcctgctctggccatttcaagacggagagaatgggcactgtcacattcctgggaaagcagcaagtgattctgagtgctgttagttctattattcaggtcaattccttctgaatgagtcataaacaactgtgctgagccagaatcctccaatctcttatcaagagaatcagttaaaaaagacgctgtagtttcatgctttttagatggagagacaggctcagccagtgagctctgcttcactgtgtttagactgtgtgctcttattcgcgaccaagttgttgaatgaaaactttcagcctctaaccaaaatttcaccaaatgctccattcgccgaagttccatgaattgaatgaagtaagggaggacaatagtgtcgtgcaagacttgttcaagggtcttagaaaggcttgatttggtctcttgagtctggtagtccagacaagatctgcctaaaagatagaagcaaaagaattagcagttcagcaacaaataatttcagattgacagattagtcaatcacttttagcaacaactggtaccagagaccttgaataaagtttacttcctagcaactaaagtaaataaaaaaactacaaatactatgcttttggtttctaaacaaagtacaatcgtccaaaacttgcctaaattattaaaaagttatttgttactcaataattctcatatctcttttaatggcaattcagaccatgtaaattcttttttttttttttttttttttttttgagacttttcactcttgttgcctaggctggagagcaatggcgcgatctcggctcaatgcaaccaacctccacctcccgggttcaagcgattctcttgactcagcctcctaagtagctgggattacaggcacccgccaccacgctgagctagtttttgtacttttagtagagattcggtttcaccatgttggtcaggatggtctcaaactcctgaccttcggcaatccacccacctcggcctcccaaagtgctgggattgcaggcgtgagccactgcgcccagcccagactacataaattcttaagaaaaaaaacttatgatactagttccaaaggggccaataaaaatattaaaaactatactcaacctcattaaaaatcccagaaaagcaaattaacataaaatgcatttttgtctgtcaaattagatttttttcaaaaattattaagcagtaacaagggcacaggaaaataggcaacactctcattcgctggtcatgaggatgtaaactggcaaaacctttttggaggagcattcaggaacagatagcaaagtcttagcaaactgcattattttcagtccagtaattccacttgtaggcacttatcctgagggaaaattgtggatatatctacaaagatgttatgaactcagcattattcattcatagtaggttaaagagtagctttgagatcgtaccttgaaaaatgaaactaaacttaataaaaaatcatttatcttatatttaactaaatttaaattataaccacaagctaattgttaggaaagacaaaaaatttttttaaaaattggctttcatagcatgatcataaagatgggcattcttataaaactgactgagggtttcatcaatttgtcaaaagagttcttcttaatccattgatattcaaatcatttttttgaagcacgtcgtgtcttcatcctcagtcttactgtcagtgtcaactagttcatctttgtcaacatcacaaacttgaggaaattctgatcttctgtgaggtttacaatttcttttaattaaattctatgagataatgctagattcacatgaagttctaagatacaatactgaaagggccaggcatggtcgctcacgcctgtaattccagtactttaggaggctggggcaggcggatcactagagcccaggagttcaagaccggcctggggaacatagtgaaaccccatctctaaaaaaataataatacctagagatcccttgtacactttagtttctcccatggtaacatcttgcaaagctatagtacaatatcactctaagatactgacagtgatacaacactctaacttgttcagatttccccagttttatctatactcattcttgtttttagttctttgtaattttatcacattgagatttctgcatccactgccaagatacaacttcaacatcacaaagatccctcatgttgcacttttataactacacccacttacccctctcacctccctgtctctaacatctggcaaacactaatcttttcatttctcttaatttctctatttcaagaatattatccaaacggaatcatactatatgtagtctttagggactggtttttgtctgacagcataattcccttgatattcatccaggtggttaaatgtatcaacagtttgttcctttttattgctgaatggtattccatggtatgaatgaaccagttcattcacctgctgaagaacatccagtttttcaatattaagctgctatgaacatttgtgcacaggtttttattggaaggtaagttttcatttatctgggataaatacagagtgcaactgctaggtcatatggtaattgcatgtttcacgtcataagaaaccaccagccagggatgacggctcatgcctgtaatcccagcactttgggaggccgaggcgggctgatcacctgaggtcaggagttcaaaaccagcctgaccaacatggtgaaaccccatatctactaaatatacaaaaatcagccaggcattatggcaggcacctgtcatcccagctactcaggaggctgaggcaggagaatagcttgaacctgggaggcggaggttgcagtgagccaaaaattgggccactgcactccagcctgtgagactccgtctacaaataaataaacaaacaaacaaacaaacaaacaaactgcctaggccaggcacagtagctcacgcccgtaatcccagcactttgggaggcctacgcaagtggatcgcttgattccaggagtttgagaccagcctgggaaacatggcgaaaccccgtctctacaaaaaaaaaaaaaaaaaatacaaaaattagccaggcgtggtggtgcatgcctatagtcccagctactcaggagactgagggaggatcacctgaacctgaggagggtgaggctgcagtgagttgtaatcacgccactgtactccagcctgcgcaacagagtgagaccctgtctcaaaaagaaaaaaaaaaagaaagaaagaaactgcctgttttccagagcatctgcaccattttaaattctcatcagcaatttatgagtgatctagcaaaacttacaattttactctctgagctatatgcattttgtctgctatgtattattgctaagtgtgccccacaaacacattgacactctggtttgaatatacacaaaagtagagagagatgtcaaaagcaggactgattttattagaagtccattggttcatggatctttttttcaacttatgacaacatgacatgcaattttctaagtgcagaaatttgggtaagaaatactgacaaaataaaggtctcctgcatatgtttttgttttggaagaacttattttaatataacggattttaccatgcatactgtgacttgcttttctcacatttaaacatgccttagacattttcccacgtcttttttagatttctaaatggctacactgaaccaggtgtggtggttcacgttggtaatcccagcactttgggaggcctgtgtgggagaattgcttgaggccaggagtttgagaccagcttaggcaacatagtgagaccctgtctctacaaaaaattaaaaaattatctgggtgtggtgacacatgcctgcagtcctagtaactctggaggctgaggcgagagaatggcttgtgcccaggaggtgaaggctgcagtgaaccatgatcataccactgcactccagcctgggcaacagagtaaaaccctgtctcaagaaaataaataaatagaaacaaatggctatattatactccagagcatgcgtataccacaatttggttatttccctataacagatatttatatgttgtccataattttttgctatcacaaacaatactataatgaatagccttcaacatacatacatacatacatacatacatacatatacacacacacacacacacacacacacacatacacacctgcacatatgaatgagcatatctgagggctaggtcttagaaagagtggcctaaatgacatgcatattttatactgatttccaaattgctttccaaagagtcttcaccagattatattatcactaaataggaggggtatttccctgcatcttcactgacattcaaattgtcaaactttaaaaaatatgctaatgtgttaggagaacattaactgattattttaatttgcacttccctcagtaataaagtgagacatctttttcatatatttatatttagtgatcagatatatttcttctggaaatgcttgtttttctactgggcatgctttatattctatatttacaggaacacaacacagctacccattatacttgtagctgttattttaaatacattttttccaaagcactttccaattatatagttctgtatcctatgacagaagtttcacatattgtactcaaatccttctaatacaagttaataaaaaatgatagttacttacccaggtcaccaaaatgagcggcctccatgtggcttggctgcttcttaagtgtggctgtcctgctacttgaaaaggagtccatgttggcagaaatggcattgattgcaacatgacttggtcctgcagcctccagcaaggcatgatttttagtgcttttttgtggggaatgtacggatattgaagctataatttttcaaaaaattgttaagaattaaacacaatttgatagcctaaaactctcataaaggggctttcagagaactttaaaaattaaattttgtaacattactcttaagtcagcatactcagcaaaaaatacttaagaggaaaagtaacttaatcaagtggtggaaaataggaaagaaaacactcttttttttttttttttttttcccagacagagtcttgctctgtcacccaggctggagtgcagtggcatgacctcggctcactgcaacctctgcctcccatgttcaagtgattctcctgcctcagcctcccaagtagccaggattacaggcatgagccaccacacccagccagaaaacattctaatattatttataattctcaaaatactgtgccaaaaagttaaattaaaagagggagatcattctctgagaacttctactgtggataaaaagtaacaaagccagaaagcattctaaaatacggattatttttaaatccttaaaccttgcttgctttaggaacaaaactaaaattgcagaataaatgcttggggtggggggaacctagaaaaatattcctcaggccaggcatggtggctcatgcctgcaatcgcagtactttgggaggccaaggtgggtggatcacctgaggtcaggagttcaagaccagcctgaccaacatggtgaaaccctgtctctactaaaaatacaaaaaattagctgggtgtgggggcaggtgcctgtaatcccagctacttgggagaccgaggcaggagaattgcttgaatctgggaggcgaaggttgcagtgagctgagattgcaccactgccctccagcctgagcaacgggagtgaaactccatctcaaaaaaaaaaacaaaaaaagataaagcacactaaaaattcataaaatatatttttagtagtctgaagaaatatcagtatcacccctttggcttcagaataaagataatttcagtcattcaataatagttgtgggaattacaaaatgaagagtgactgtcttcaaactattttttcaatgttaaaagaaggtttatttttattttcatgagaaattggagcaaaataatttttagcttatttataaacaaaagccagttttcgtgttcagacaagtacaagtaagagtctataggaatggtgagactctcgcattgtttcttaattagatgtatataatgtaaaatgctactaactcatttgtacaaggctttccccggtccctcttaacatctctcttagaactagtaacttatttttaccactccttcctgatagtctatctttcttggtctccatggtattatactctcctaatttcctcttctatctgctcattgctctcattcttttaatacccatttatcaacacccagtgtgtcagatatagcctgcttctttggctccccttcttgaggctatctgttcttcttttattctttctgctagaaagcatatttactctcaaatctttaattattaccagagcaataattttcaaactttttaaaagctgaaacctcctttgcttcccaccaaaataaacttaacaagggaccgggtgcagtggttcacgcctgtaatcccagaacttttggaggctgaggcaggcagatcacgaggccaggagttcgagaccagtctggccaacatggtgaaaccccatctctactaaaaatacaaaagaaattagctgggcttggtggcacaagcctgtaatcccagctacttgggaggctgaggcaggagaatcactcgaacccgagaggcagaggttgcagtgagctgcgcgatctcgccactgccctccagcctgggcaacagagcgagaatctgtctcagaaaaaacaacaacaacaacaaaaaagtaattctggcaaattcaagggaaacatcttactcacaccctccacatggactgtttgcaacagctcctagggtacacctctgtggagcagatgaaaaagccctgatctgtatctgtgacttgtctttgacctgggctttggtcttgtatcactgattactcgctactaagcattcccacccacattgactttaccatctcaagcacaatctgtctaaatatcaacttaaaacatcatcatctgattctcctctcaatttccctgtctgttcaatccaccagtctccaaaactcaaaatcttggtcccattctttttcactgttatctgtttacttgccaagatttgttgacttttccttcaagatgtttaaacatttacttacctgtttatttttaacacctcaccctcagtgcaagtctttctgtattataacaaaaaaacttccggggtctccatcctgcaaatctcttccagactaacctttcataaacaccatacttacagcatcaatatcttgctcaaaaacctacagtggcttcctgcttcctctgtctcaattctcttttctggtctttacagccttctataccttcatctcaatctttctgtaaaaatctccctctacttgtctgaaggcccctttgcccaatatatcctcaaataagaagctgggctggtagggagaagagaaagaatctctcattcaaatctttcttattcttcaacttttatacaaggtaagtgtcattgccatgaagtcttccctaaacttcagaaatcatttgttgatctcaaattcctctgaattccttgcagtgcttcactcagtttgactaattcaacaaactgaaggctatgttaaaactagataatgatagctaccaatggaggacctactatataccaggcactatacgagtttctctatgtaccttttttttttttggatattatttcatctatctctcaggacaatcttgtaagaccatattttcctcattttagagatgaagacaaaaatgaaaacaagttgaatactttgccctaggttaatgagctagtaaacagccatttcaacaggcaggatttcaacttaggtttgctagactctaaaaaatcactctctaacctttggtttaaaactcagaccttaaaattactatgcatataaaataacatatataacatatataaatgaatgactcaaaagcacctcccacccaacataacaaaactgaacatataatttcctgttttggttctgttaggcaagccagaaggtaggtatcaatcttaaatatccctctctctcacacctcatatttaatcaataataaacttctatccattttgcctccgaattttttttcaagtccgttcacatctctttacttccatcactaccaatctaggctaagccatctgtggaattacttgattaatgttcctctcccctactaatctgtaagttcaatgagggcaggacctaagtcttttttgttcaccgttatagtcagtttttgtctaatgcccagaacagaagaagtgttctataaatggcagctattattattttggtctatttgctactgttctgtgtataagtttgtctttctaaccagactgcaaacatcttgaggggctgtttcttgtactgcttctgtattatcctaaggataagtcagtgaatgttaagcacagattatgtacttcataatcagagtataagcacagaattttttagcccagtagagatttagaaattagctaggccaatccccccattcaacaaatgaagaatctgaagaaagttacaacttcccaaggtcatactgttagtggcaaagtttagagtggaagactggtgttctcactgcctgaaacatctaagttccttccttctactacagtcagatctagtctttacaggtctctgcttgagaagggctttaagcctttatcactgccaatcaagttttgctcaaagaaggcagtttgaactaatgtggaatctaactggctttacataagaaataagtaaactaggctgtaaggtaccttacttttttccctaattttacaacttgcctaagttataattagtcttcttctccagcaaattgagcatatagaataaatactcagtgcaagcaatacaacataaaaacatttgaaggaaaaatctaaataagtagcaatctacagattttatggaaataaattgatgaaattaatatgtaatgactatggaaacaatttccattataattttcccacttcaatctctgtacactggacaaataaaatcagtgagtaatacagcatctttaaaaagcatgctctaatctataaacaaggacaatgtatcgatcccaacaaaaaataaacaaaatatattttaaattaaggttgttcattcaaataaaaaagtaaaaactgtaatcaaccatacttctggataaatgacagaaaactaagccttataagtgtcagtgctttcctacagttaacagactgctcagttaagagtattcttcattttttgtcttactaaataaataaagtgaactaatcacttttagggaacaattaaatgtgtgattaataagaagggcactggttcactgtaatcactaggatagccaatacacacaaggctcagtaaaagcctacttatggccaggcatggtggctcacgcctgtaatcccaggactttgggaggccaaggcgagtggatcacttgaggtcaggagtttgagactggcctggccaacacggtgaaaccctgtctctactaaaaatacaaaaattagctgggcatggtggcggccacctgtaatcccagctactcgggaggctgaggcaggagaatcgcttgaacccgggaggtggatgctgcagtgagccgagatggcaccactgcactccagcctggggataagagcaagactccatctcaaaaaaataaaattaaggtaaaaaaagcctacttacggccgggtgcggtggctcacgcttgtaatcccagcactttgggaggccgaggcgggcggatcacaaggtcaggagatcgagaccatactggctaacatggtgaaactctgtctctactaaaaaatacaaaaaattagccaggcgtggcgccgtgcacctgtagtcccagctgctggggaggctgaggcaggagaatggtgtgaacccgggagacagagcttgcagtgagccaagatcgcgccactgcactccagcctgggtaacagagcaagactccgtctccaaaaaaaaaaaaaaaaaaaaagcctacttattatatgctagatgttaaagcattatacaggttaaagagggaaataaatcaaaatcataagtaattataaaataaggcagaaatgattaatgccaaaagagagagtataacaggattaaagaactcacaaatgcaaagcacatcactttttaatgcagtggactgccaagggcagaacttacctttaatggacttcacatctgaggtcttctcttgttctttgcctttcactagaacataaaaagataattatgaccaacttttgcagtcagagatccattctataacactgtaaaaattagaccagctttattctaagatgagtattcaaagttctagaacaatggacagccttggaggagggcacaggagggtagttgtcagcaaaggcttctctaaggaagtgaccttggaacagcatccagtcaaaagagttgaacctgcttatggagagacaatgtagtcacaacatctggggtcaaattctggctctaccacttataagccatgtgatcttggacaagttacttacttctctgggtcttaattttcttgatttataaaattaggtcaataataaaaactaccttagaggattattgatgaaaaaaaatatatacctgtaaggggcttagaagagtaactagcacagtaaattgaggacaaatgctaaccaatattattaccatgtgtcatccatagtactagctactagaagcatagtgaagaaaggtctttggttgtgtatcatatcttattacttattcctcccatagcatcaagtgaaaacatcctaagcctctaacactcagagtataataatttgtctgggccaggcacggtggctcacgcctgtaattccagcactttgggatgccaaggcgggtggatcacctgaggtcagtagctcaagaccagcctggccaacatggtgaaaccccatctctactaaaaatacaaaacaatgagctgggtgtggtggcggacacctgtaagcccagctacttgggaggctgaggcagagaattgcttgaacccaggaggcggaggttgcagtgagccgagatcgcgacactgtactccagcctgggagacaaagagagactccgtctaaaaaaataaaagataaagaataatttgtctgtaaaataatcatataattgcttccttactacataaaacagtaaaaattctgctgtagataagctaatatgacatccaagataggaaggtgcccagcagcttaagccaagtgtgaattctatcacaggatctgacataagactatttttaaccctcttttcttgtttttttttttcaacattaaaaaatcttaccaggaaaaggttatcaaaataagaaatgccaaaacgtgcccatctctgtatttgtgctcttaaacattgaaaggtgaaaggctagtagcaggaaataactcgccctcagagtatctggatgaagtcaatacatcaactgttgagtgcttggtatgtgccagacatgctcccagctcagaaaaggcaatgattttgccttcaaaaagtctacattcaagtgtgtggagactaacatgaaaaaaataaataagatcgttgcaggtactgatcactgctgtcaggaagacgacatttaaaaatgttgtagggtcactggtgtttgcagccctctcagcagcatctgcccatggactacatcactcactttaaacattaacttgtcttggcttccttgactcctctcttctgcatatacatctgtatttcctggctgatcctacccattcttaaggcttacaataccatagatacgctgttactcctaaatttatatctccatcctaaatcttttatctcaaattcatatagctaaccacctacctgccatcttccataattccacttgtctaaaagggaacatgtcatcttctcccaaacctgttcctacctcagtcttcatcttccctcatgaatgacactgtcatccacccactactcagaccaaaattccggaagtcatccttaacatggtctgtttattaccttccacatacaaactatgaccaactgattctactgccaaaacaaaccaccacggttccacttttaccacctaaaaacattctcctactatcaatcagatctcctatgttatacttctaacatatacacaactcaacaatcaaatatcagcattttgctttatttccttctgtccccctaagtattatacatagactttagagttcctatgaatcaccacctgacccttcctttcccagatataaatacttactaaattagatatttcctggccaagcgcagtggctcacacctgtaatcccaggactttgggaggccaaggcgggtggctcacttaaggtcaggagttcgagaccagccttgccaacatggtgaaaccctgtctctactgaaaacacaagaattagcagggtgtggtggcgggtacctgtagtcccagctacttagaaggctgaggcagaagaatcgcttgaacccgggaggccgagattgcggtgagctgagattacaccactgtaccccagcctgggtgacagagcaagactctgtcttaaaaaaaaaaaaataaataaataaataaagacattttccttccatgtacgttttttgactatgaccacatacaaatactttttatttttatttttttgagacacggtcttgctttgttgtccaggctagagtgcagtggcctgataacactcgaactcctgggctcaagtgatcctctcatgccaccatacctaattatcctttctgttgttgagatggggtcttgctatctcgcccaggctagtcttgtacacctgggctcaagtgatcctcctgcctcagcctcccaaagtgctgggattacaggtgtgagccaccacacccagccaaacgtgtatatatatacatgtatgtgtattttttttaatggcattattctgcacatctttaaaaatcacgcaaatggctgagcacggtggctcacgcctgtaatcctagcactttgggaggccaagttgggtggaacacttgaggtcaggagttcaagaccagcctggccaacatggtgaaaccctgtggccactaaaaataggaaaatgagctgggcatggtggtgcatgcctgtaatcccaactactcgggaggctgaggcaggagaatcactttaacccaggaggtggaggttgcagtgagctgagatcacgccactgcactccagcctgggcaacagagtgagactccatctcaaaaaaaaaaaaaaaattaattacacaaatgacactctatacatatctgacctgtattcattcaataatctgacatgactattgaaccagttctagttcattcacgcagctctagtttattcattttagctacttaattgttttataaatatacctttactcattttcctgttaatgaacatttactttatttcctaattttcacttaaacattcaactagtgaacattctagtacacgtcttcctatgcatataagcaagaatttctctaggataagcctctagacatggaattgctaggtaacaaattatgtgcatttttttcagccaggagcattggctcacgcctctaatcccagcactttgggaagcagctcacctgaggtcaggagttcgagaccagcctggccaacatggcaaaaccctgtctctactaaaaatacaaaacttaaccgggcgttgtggcatgtgcctgtaatcccagctactcaggaggctgaggcaggagaattgcttgaacccaggaggcagagattgtggtgagccgagatcatgccactgcattctagcctgggcgacatagactgtctcaaaaaaataaataaaaaacaaattatgtgcatttttaatgaaagtgactgtaccattccatgcactcatatagccatgcttcatattctcatccttggtatttttaattttgccaacttactagttttgaaatggcatttgatgtttttaattcatttccttgtttcctttgaggttaaacatcctttcatgtttattggtcattttggcttcctcttttgtgaactgcctcttcatgtcccttgtcttttacttattacttgcagaaattccatacacgtcctggatgtaaatcttctcttctagaagtatcttaggtatactttattgtatgaaagttttaggttttttgctttgttttgttttgtttttttgagacggaatctcactctgtcgcccaggctggagtgcagtggcgcgatctcagctcactgcaagcttcgcctcccgggttcaggccattctcctgcctcagcctcccaagtagctgggactacaggcgcccgccaccacgcccggctaatgttttgtatttttagtagagacggggtttcaccgtgttagccaggatggtctcaatctcctgacctggtgatctgctcacctcggcctcccaaagtactggtattacaggcgtgagccaccgcgcttggcgaaagttttaagttttaacgtagtcaaatttacacaacatggattatattttcctgtgtcttattttaagcaatatcccttcctatcctgagatcaggattgttccccctacctgttcttctacatgacttcaagttttgtttttttaacattccaggctcttatttacctggaatttgtttctgcatcagggattggcaaactacagcccatgggccaaatacaacccactaccttttgttttgttttgctttaagactccgtcaccctggctggagtgcagtggtgctatctcagctcactgcaacctctgcctcctgggttcaagtgattcttgtgtcttagcctccagagtagctggaattatagacacccaccaccatgcccagctattttttgtatttttagtagagacagggtttcaccatgttggccaggctggtctcaaactcctgaccccaagtgatccatctgccttagcctcccaaagtgctggccatgcctaaactggcccactaccagtttttgtaagtaaagttttatcgtagcacagccatgcccatttgtttacatattgtctatggcttcaaggataaaggagagtgtgacagaaaccatatggtctggaaagcctaaaatatttatgatttggcccttaacagaaaaagtctgttgatctgagatatatgagaggaggcaggaaattattttttgccagatgatggataactagcatcatttacagatcagtctatcttttcccaactaggaactctatatccgaaattcccaatatacctgggtctgtttctgtgcatttgttttgaatatataccataagtatcaagaatggaatggaaaccaaatggaagcctatggcaaaataatgctgcctcctcaatctttataaaaccagctccctcttgacatttaagctaagatttgaatgtcatctccttagaggacatccttaaccactcaatcttaacagagatgactgcctagaccagggtgttaattgtcacagatggtgagacgtggtaggatttcgatatgtgtgaggtagacctaacagatttgctgatggatcagatatagagtaggaggaaagaagaggttcaaagatgtactaaagttttgggctgagcaactaaaaatccaaaaatgcagccgggagcggtggctcatgcctgtaatcccagcctttgggaggccgaggcaggcagatcacctgaggtcaggagtacaaaaccagcctgaccaacatggtgaaaccctgtctccaaaaattagctggtcatggtggcgcatgcctgtaattccagctacttgcgaggctgaggcaggagaatcacttgaacccaggaggcggaggttgcagtgagccaagatccgccactgcactccagcttgaacgataagagcgaaactccatctcaaaaaaaagaaaagaaaaaaagccaaaatactacttcttgagaaaaactgatgagcaggtttaaaatgactaaatctggcataaaattttagatattgtaagttgaaggtatctactggattaagcttgtccatcccgcggcccaggatggctctgaatgtgcccaacacaaattcgtaaactttcttaaaacattataagttttgcgatttttttttagctcatctgctattgttagcgttagtgtactctatgtgtggctcaagacaattcttcttccaatgtggcctagggaagccaaaagactggacacctctatattggtcaggtagagatacaaactgaacctaaagttggatataccagtctggattcaggggcaaggatccaacgtagtgatgtaaatttgggactcaatgcattgatggtatttaaagtctgaatcgaatccctaacaggaccatctccagcttctactcttaccacatccagcctccaaaaagcacctagaatgatttttttttttttttgagacaagatctcactgtgttgcagtggtgggatcatagcttactgcagcctcaaactcctgggctcaagtgatctttctgcttcagcctcctgaataactcacaacacccagctatttattttttctttttgtagagatggagtctctctatgctgtacaggttgatctcgaactggcctcaggtgatcctcctgtctcagcctcccaaagcccttgattacaggcatgagccaccatgccctagaatgatctttttaagatataagttcagatcactcctctttcaaaattttaaattaatattctttctgtattttgtttgacacatggtctcactttgtcatccaggctggagtgtagtgactcaaatatggctcattgtagcctccacctcctaggctcaagtgatccttctgcctcagcctcctgagtagctgggaccacaggtgtgcaccatcatacccagcaattttttaaatgttttgtacaggtctcatgttgctcaggctggtcttgaactcctgggttcaagctatattcctgcctcggcctcctaaaatactgggattacagatatgaaccaccatgtttggcatctcggcattaggaataaaacctaaccatggcccgtagagctctcaatcacccaacacttgcctacatctatgctccagtcacagtagccttctttcctctcttgaagggcaccatgctctttcttgcctcctggcctttgaacatgcgattccctggcctctctagttacctcctactgatccttcagctctaagtttcaaggtcacctgctgagtcctctaacatctaaccaaaatgcatttctcctcttaatctttcataacactttactcaacttgtaagtatacacctatacacacacacttacatggagcgaaagggagaagagagaagatttgtttgcttatttattatctgtctaccccagtagacaataagctccatgggtgcagggacattctctggttcactactcaatcgtgagggcctagcacagcacctggcagactctggacactcaaaaggtatttgttgaatagagacaacagtctcttgtgcaatatgcagtttgcctcattattcttagaatgttttccccccttaaaaaaacaaaagttaaccacttcaataccaataaattagagagctattaggtatacccctgccttaccaataaagcttcctcctactattttaccggtttcattcattaagcactttcatgcattcatcacctggcatcagttaccaaaaccgtgtacccacttaagaagaagtatttaaagtcattcagagttcaatgggcctttgggaatcatctaattctcagctgacagaagacagaaaagtaggttaactggtctgcccctgttacagttagcagcagagctgtcatatgaaaccaagttcgattttgtttagtgctttttccaaaacccatttctggctggccgcggtggctcatgcctgtaatcctggcactttgggaggccgaggtgggaggcccacttgaggtcaggggttcaagaccagcctaacatggtgaagccccgtttctactaaaaatacaaaaattagccgggcatggtggggcatgggtaatcccagctacttgggaggctgaggcaggagaatcgattaaacctgggagacagaggttgcagtgagccgagactgagatcgcgccattgcactcgagcctgggcaacaagagcgaaactccgtctcaaaacaaaaaaagaaaacaaaacccatttctgtctggtactttttttttgagacggagtttcgctctttttgcccaggctggagtgcaatggtgctatctcggctcaccgcaacctccgcctcccaggttcaagcgattctcctgcttcagcctcccaagtagctggcattacaggcatgcgccaccaccctggctaattttgtatttttagtagacacggggtttctccatgttggtcaggctggtcttgaactcccgatctcaggtgatccacccgccaagcctcccaaagtgctgggattacaggcgtgagccaccgcgcccggcctctgtctggtacattttatctgaagcaacaggaattgacaggaaaaatcactgctgtccacagacccatacttgctcacttcggatatgtatttttaatgaagtgcaacaacgttacccagaatcaaaattaagctgtttctacgtaaacattgggcaggtaatacaactggaaatcaaaaatgtaagtagttcgtttgtaagttagggttccagtagttagcaaacttgccaaagtcatcaaaagtagtggtcttcctgttggggaactttagcaataagtaattttattttagtaacagcagtaactacccctccccccaaagaggaaattggaagacagcactgggtgaagaaaacaattttttcacgtgttgcttttagacataaaaccctcaacatttggaaacttcagacttccataataaggttctaaagagatttccttgatcttgatccacggtcctcaaagaaacacaaaaaaactaacccccacctaagaactgttcttaaccaaacaggcaggaacttctatgggctttagcaatcgcttctgaaccagcgcgacaatactcctctgacctcgcgcaagaaggccaccttctccctcccagaagagtcccggagcagagcaaggcactcagggggcatctgcgccgaggtcgaggctcgctgaaggccttgctgccgccttggggaaagccctcgcaggcccacctgccccaccgccgcccctgaggcccggcctgactccccgccggcgccccctcagctacctttccgccggaagaaggacatggcggggcccgggtcgggacggagggtgcggggggactggcgcggggagggcccggctcccctcattcagcaaccggcccggacttccgggtccagaggggccgctgcactagcgcgaaaagggacccttcttccgggagtgggccccaccgcctcctcgggatgcccaggcagctccagccgccatattatcaacaagccgcccgcccggagttccggtccttccccgcgctaggcttcacgggaggtcaagcgccggccccgccccttttccccatccccctcccgcgggtgcaggggcgcacgcccgcatcgcccacgtgacccgcgcgtgctacccgcgcctctttcccgggccctgggtgcctggagcgagccaccgttcctgcagctgttttgtggcgtctgtcgccggcccccggtggagcgctgcagacccagtctctgcaaaactaactccctggggcgggagccctcccagcagctggaacggggcgggccttaggtccccggcttccggcccctgggtacccttcaaattgtgcccttctaaaaggcagggtcaaccctgccacgctccagctcgacccctcctgctcctccgtttgagttttgctcacaggcgctggccggcacgagcagcttcaccctgcaccccagtccctgcttcctcaggagaacccgccacggcctgcgggttcgaggcgatgcagaaccctgattaggaaaaggcacaacctgccgcatgcggaaccagcagctccctggatcattagcgaatgaaaaggggaagcgggcttatttcggagtgcagtccctgcgaatgctcaactttgtaagggactgcaacataaaagcctcgccagtatttaaaagctagctccagtgaatcatccttgctcaaatgccattttcctgtgaatcttctgaccctctactcccaaagcaaaatcaatcaagcctccctgtctttggtgcttcttaacacccggcgagtgcgctcagcggctgaggttgtaactgctccctggggttggggttggggagggcaggaaggtaatagtaactcaataaatgttcgctggggtttttaaaccaatgaagtttatcatgtgacggatggggaaacaggcccagaagagacaactagcccaagattgttcagaatgttagaaataccaaaattgttagaaatagataatcggtgccacgaagaaaagtcagcacggagacaaaagatctccagcaaggcaatctttactttctgcagaaagggtgctcaatcgcagatggaacgatgtcgagagcacacctgaacaaaggaaaagcaaacatatttatcccttacgcatttgggtcgtcctcactgctatgtcctgcatccattggctggagcgggacctcacactcttaaactgatagccgatttgctaatagcctaaaactttctaaataggtaagtgcaaggaagaacgaagaaggagaggaagttgcttaccgaaaggtttaaggaagcaataacatttccaaataaggaaggggcataggctgtgaactggaacgtgcctgtgagcatgtccaacagttacataggatagggcttaacaaagagttattagcacaaagcaaggaggcttgaagaaagttagtctttaaaataaactattacttctaacacttatgatgtattctttaacaagaaggggaactttgaagaggaaactttttactttctacaagaatgtccaagtttaagactataactagaacccgaaataggcaaatcccttaacctgctctaataataatatggtcttttcactatattgttagagcaggttaaaagatttacttatttcatttctggccagatgcagtggcttatgcctgtaatcccaacactttgagaggctgaggcagtcagatcacctgaggtcaggagttagaccagcctggccaagatggcgaaaccccgtctctactaaaaatacaaaaattaactgggcgtcgtggcatgcctgtagtcccagctaatcaggaggctgaggcaggagaatctcgaacacgggaggtggaggttgcagtgagccaagatcgcgccactgcactccagcctgggcgagaggaagactccttaaaaaaaaaaaaaaaaaagatgtgcctatttcgtttcagagcatggcatgtttgcaagtgcatgaaaggtaaccaaaactgacatggaaatttactatgcgacggtactgtgctaaaccctccagatgagtaatagtccttggagtcagtcctggtatctggaaaactaggcactgaaaaataaagtcaactgctcaaggtcacacgctaactagggatgaagcctggatttcaaggtgaagcctttctccagttaaggacagcgcgtccaggcgcactggacggaagcagcgctggcagaggctccggacgtccggagtgagctggcgccgaatggacgcggtctggccgcttcctcctggcctcggccgggcctgcaccgggaggctgagcggcgccccaccagggatccgagatgccctcgggagccaatctgtgttcttggcggaccacaccccgctgtctgtagccaataaaaccttggatcgtgcatcccacccccaccaaagggagattggctgaagccaaggacccgggcgcggtctacgtgggatttctctgcaggctgaggggacaagtggctgtgtctaccaggggcccaagtacagggcatcagcaagaaagcgcagcgcccttctcctgttcccttccagcgtgcagaacctcgcaggggctattttgtatgtgttgtgtggttagttggatggggcgggagggacgtaggggaggggagagtgcgagaaatcccctgaatgtctctggcacgggagcagatcccacagagttggaggcggaggactctaagttcctctaaatctcctctaagccttcctcattctctccagctaagcagtctgtgcagaagcagtgcctcacctcgacttccagtgtgatttgctgcctttgagccctgcccaccagaaattctgaagtcgccgtaatccccgacagctgcatacacctcagtcatgataatggccgtcattatttatgaagtacttattatgcgccctccttgtattaagtgctttacaattactagctcacttaatccataattcctgcccttccccgaaaagagaccctgtgagatggctgccatcgcaacccccaatttacagatgtggccctgaggatcggggtaacttatgtaggatcatgaggctgttaagaggtagagacaggatttcaatcgctgtcaatcagactccaaagccatttgcttataccactttctcctatctttctctccacccacacatttatccagggtcccaaaatgggatgtctgtcgggcaggtatatgggggtgaatgatatctggcagtacatattcttcgggtaccttctgaatcatcacccattaaaatgtttatatgcttagggaagcttgctgctaagagtattgtcatttaatcttttgaaatttgatgatccacatatgagtaaagttaaaagaagaatttaaaaataacaagaatattacattaggctgaatacgcagctgtggcaaactaataccctgcattgtatttctgaattaacttcataaagtcattttagtttacatgtaagataaaattaatttttatcaggagttcctttaattatgctcctaatttttgggaaccgtcacagtgttgttttgttttatgtgttttttttcttttttttttttagacggagtttcgctcttgttgcccaggctggagtgcaatggcgcgatatcggctcactgcaacctccacctcccgggttcaagtgattctcctgccacagcctcccgaagagctgggattacaggcatgcaccaccacgaccggctaattttgtatttttagtaaagatggggtttcaccatgttggtcaggctggtcttgaactcctgacctcaggtgatccgcctgcctcagcctcccaaagtgctgggattataggcgggagccaccatgcccggcctcgtcacagtctttttataccagttgtattaattacaacaaatcagtgaggtaaaatcagtaagttaattatcacaaatccagtgaatggtttaatctaacattgtttaaaaatcaatgaatagtattctacaacaaacattctaacaaatatagtttatcaaacattcataactttttttttcgagacagattctcatctcactctgtcgcccaggccagactgcagtggtgggatctcagctcactgcaacctccacctcctggattcaagcaattctcctgcctcagcctcctgactacaaatgtgtgccaccatgcctggtaatttttgtatttttagtagagacggggtttcaccatattggccaggctggtcttgaactcctgagcttaggtgatccacctgcctcagcctctcaaagtgttgggattacaggcatgagtcactgcacccggccctggttttagttttaatcaaatcaattgtaccgaaaggggagaagagagaatttagcaaggaaatatttgaaaagctaacggctgacaattttcctgtggtgataacagaaaccaacacactaattcaagaatcactatgaactgcaaacaaaagaaatacaaagaaatctgcacacagattattaataacaaaacttcaggaaataaaaatgaagaaaaattgttaaaaattgctaggggtaggggaagcagattaccttcaaaggagtgctacttggccgggtgcggtggctcatgcctgtaatctttgggaggctggggcaggcagatcacttgaggccaggagttcgagaccagcctgtctaacatggtgaaaccccatctctactgaaaatacaaaaattagccgggcgtgatggtacgcacctgtaatcccagctatttggcaggctgaggcaggaggtggaggttgcactgagctgagatcacgccactgtacaccagcctagatgacagagtaagactccgtctaaaaaaaaaaaaaaaagaggctgggcgcggtggctcacgcctataatcccagcactttgggaggccgaggcggacagatcacgaggtcaggagatcgagaccatcctggctaacacggtgaaaccccaactctacgaaaaatacaaaaaaatcagccgggcgtggtggcgggcgcctttagtcccagctactccggaggctgaggcaggagaatggcgtgaacccgggaggcagagcttgcagtgagccaagatcacgccactgcactccagcctgggcgacagggcaagactctgtctcaaaaaaaaaaaaaaaaaaaagagtgccaagtaaacagctgattttttaaacagttacagtggatgccagaagattcatattaaatattcaatatgctataaaaagtaactgctggctagtcatggcccagcactttgtaaggccaaggtgggtggattgctagagctcaggagttagagaccagcctgggaaatgtggcaaagcctcatctctacaaaaaatagaaaaattagttgggtatggtggcatgcatctgtagtcccagctactagggaggctgaggtgggaagatcacctgagccctaggaggtcaagtctgcagtgaaccgagatcacattactacaccccagcataggcaacagagtgagaccctgtctcaaaataataataataatgataataactatcaaccaacaattttatatccatcaaaaatatatttcaaagatgacacaaaataagatttcagacaaaaacggaaaaaattggctgtgcgtggtggctcatgcttgtaatcccagcactttgggaggccaaggtgggtggatcacctgaggtcaggagttcgagaccagcctggccaacacggtgaacccccatttctactaaaaatacaaaaattagccgcgtgtggtggtgggtgcctgtaatctctcagctacttgggaggctgaggcaggagaattgctggaatccgggaggtggaggttgcagtgagctgagatcgtgctattgcactccagcccaagctgacaacagcgagactcagtctcaaaaaaaagaaaaaaattgtcaccagcagacctcactaaagaatattctattttggccaggtgtggtggctcatgcctgtaatcctagcactttgggaggctgaggtggtcagatcatttgaggccaggagttcaagaccagcctggccaacatggcgaaaacccgtctctactaaaaaaatataaaaattagctgggcatggtggtgtgtgcctgtaatcccagctatgtgggaggctgaggcaggagattcgcttgaaccagggaggcagagattgaagtgagccgagcttgtgccactgcactttcagtctgggccactgagtgagactctgtctcaaaaaaaaaaaaaattatatttgatagcacaacagagtgactctagtcaatacaaaattaaatgtacattttaaaataacttaaagagtgtaattggattgtttgtaacttgaaggataaattgcttgagaggatggataccccattctccatgatgtgcttatttcacattgcatgcctgtatcaaaacatctcatgtactccataaatacatatatctactacgtacccacaaaaataacaaaattaaaaataaataaaaaataaaagtatgtatgtgcaaagtttaaaaaaaaaaaagaatatcctaaaggatttacttcaagcagaataaagtacatgagatagaaagtctttgatgcaaggcactagaataagtggtatgtggataaatgtgaataaacattgagtgtaagcggtaataataaagttgtgaaagttaattaactacaaaattagagggcatggtacacacatgagcacccttatttctgacaccaactgcaagttcaggggtccccaaggctatccttaggtttgataatttgctagaagtgctcacaaaactcactaaaagctgttatattcacggttataatttactacagctcaaggatacactttaataatcagccaagggggctgggcgcggtggctcacacatgtattcctagcactttgagaggccgaggcaggcggaacatgaggtcaggagatcgagaccatcctggctaacgtgaaaccccgtctctactaaaaatacaaaaaaattagccgggtgtggtggtatgcatctgtagtcccagctactcgggaggccgagacaggaaaatcgcttgaaccggggaggcagaggttgcagtgagttgagatcattccactgcactccagcctgggtgacagagcgagattccatctcataataataataataatcagacaagggaaaaatgcatagggcaaagcccagggaggtaccaaatgagaatatccagttgtcctctccctatggagtcagaatgggtttcccagtatagagcattgccaaccaggaaagcttacccaagcccttgtgtccaaagtctttattggaattccatcatgtaagctgggttgtctgcccatgtggttgattctagtctctagccactcaggaggtcacactgatgccacctgatccaaagcccccaacccagatcacattgttgctatctggctggcccaaggcccctagtcaaaacaaaaatacttctatcaggaatgatatttcaagagtttaaagagattatgtccagtagctggggacaaaggccagacccctctttgggcaaggttaaatccttttctacacaaacatctagcaggtttaaaaatgtcaccagtgtggcaggccactgaatcttagtagagtttatatctcaccttctggcatgtatgtgtcttgactgtgtttctggaacacttgccatttcttgcttacaatcagcatgatgtcgtcaacatagtgtctccatatgatgttctgcagaatgtccagacaatcaagtatttttttttttttttttgagacatagtcttgctctgccacccaggatggagtgcagaggcgcgatcttggctcactgcaacctctgcctcctgggttcaagaaattctcctgcctcagcctcctgagtagctgagatttcaggtgcccaccaccacgcccagctaatttttgtatttttagtagagatggggtttcaccatgttggccaggctggtctcgaactccagaacccaggtgatccacccccctcagcctcccaaagtgctgggattacaggcgtgagccaccacgcccaacaattttttttttttttttgagacagtctcactctgttgcccaggctggagtgcagtagtggcatggcatgatctcggctcactgcagcgcctcctggattcaagctattctcctgcctcagcctcccaagtacctgggattacaggcatgcaccaccatgcccggctaattttttttgtattattagtagagacgaggtttcaccatgttggccaggctggtctcgaactcctgaccttaagtgatccttccaccttggcctcccaaagtgctgggattaaaggcgtgagccaccatgccggacggatcaaggattctttagacttgcactgtccaagattttagtgaatactaaatagccacacgttgctattcagtattttaaatgtggctaatcaaacgaagatgtgctgtaagtgtaaaatatactttctatttccgtgcactctaacctgacagcttcctactgcaaatacctgtgactctgtctgtgctctttctttctgtctttttttttcttttttttttttttgagacagagtctcactctgtcaccaggctggagtgcagtgtcaagatctcggctcactgcaacttccgcctactgggttcaagcgattctcttgcctcagcctccagagtagctggtattacaggcacgcgccaccatgcccagctatttttttttttttttttttttttgagacggagtctcgctctgtcacccaggctggagtgcagtggcacaatctcggctcattgcaacctccacctcccaggttcacgccattctcctgcctcagcctcctgagccgctgggactgcaggcacctgcaaccacgcctggctaatgtttttgcatttttagtagagacggggtttcaccgtgttagccaggatggtctcgatctcctgacctcatgatccgcccgcctcggcctcccaaagtgctgggattacaggcatgagccaccgcgcccagccccagtccatttttaaataaggaaaggaatgtgagctggggccgtagcatgcctgggcatgtagtaaaatcagaaagaaggaaaaggagaagaaaggcggggggtggtacttggaattagagaataagaagcggatcagcctgtttgaagagaaaccttgtcatatcttacagtagtagcatctcccacagtccacactggccaacagacaattaccaccacccagcctgtcacagatgccagtgtcctaatgaaggctgtgtcctccaatggcttctcaggtcttgcatagtaattcaattccaacattcctgctgtcagaggcattggaatcagagcgactccatggtaaaatgaggctgagacctgctaggctgcattcttagtcacaggaggagataggaggtcggcaggagaagttataggtcataaagaccctgctcataaaacaggatgtgataaagaagccggccaaaacccaccaaaaccaagatggtgatgaaagcgacctctggccgtcctcactgctcattatacacattataatacattaacatgctaaaagacattccctccagggccatgacagtttacaaacgccatggcaacgtcaggaagttactctatatggtctaaaagtggggggatccatcagttctgggaaatccctgcccctttcctggaaacctcacaaataatccaccctttgtttagcatagaatcaagaaataatcataagaacactcagttaagcagcccatgtcgctgctctatggagtagccatttttctgtttcttctttaataaaattgctttcactttactgggtggactcgtctcgaactctttcttatgcaaggtccaagaaccctctcctggggtctggatcaggacccctttccagttacactacctccttaagccttctgacctcttcctcaatagtatgttgagaaagttctggcactatcctcctcattttactctaggccaagttcaatcctgaccatctgttaggactagctctgggatctcctgctatagcactggatcttgagttgtgggtaaaggccctcaaacgggaaaaactccccagggccaggcttatattccaccccacccccagtccaacagcttcaacattgactcccacacatgattccctggttcctcccacacacagtggccagggctagtgaatcctttggccagtgtggtattttctcctgtagcaggctctgactttcttgctcaggctgtgtggagacttgactttggttatttacctagaaacagagtggaggggtccatctttagtaggacaaatggcatcttgcagggctcctgcctgtgctgaggtcaatgtccagccttctctggggagcaggggtattgaggggtctgaaggtgcaagcttctcagggttaaccactcaaatgtccccaattcacatctcaggatttgactcttatttatcatggtgttgactttgactaggagatgagataagactatgcatcctctctttttttcaacaattacaacctgggcctgatcatcagcaaagtctgttctctggtgaataatctaacttccaaatcccaatcctcttttagggccactcagtgtttagcctcagttaccccagaaagcaaagcctgagatgaaggtctcatggcagggctatgtgaaggtgcacagtctcaggggcagggatgagaaatgagggaagcgagggagggacagagggagagcccacacaagactgtgttatcgagctggttgcttctaagtctgaagaattgccagattctcaaactcctgaccttgtgatccgcccaccttggcctcccaaagtcctgggattacagacttgagccactgcacccggccctggccatatctttaacgtgctgctggaagtaagggctgtaaataaactgaataaatggaatgccagaataacctttcttggttgtgttgttgtgttgtacacataagagaggcagttgagtcatgtctaatccatcaggagtagctaagcctccagaatcaattattaataccatattgggagctcttgcatgatcttttatccaggatgtctcaaatatatttcagcagagaaccctagaatcagtgatcaagaaagctagaaggggttgggcacagtggctcatgcctgtaatcccagcatgttgggaggccgaggcgggtggatcacctgaggtcaggagtttgagaccagcctgaccaatatggtgaaaccccacctctattaaaaatataaaagttagctgggcatggtggtgtgtgcctgtagtcccagctacttcggaggctgagacaggaggatcatttgaacccgggaggcggaggttgcagtgagccaagatcatgccattgcactccagcctgggcgacagagactctgtctaaaaaacaaaaacaaaaaaacagagctagaaggaatcttagcaatggtctcatgcaattccctcactttatggatcagaaaactgaagcctctttcagtataataataacaacaataatgaccatcactgcaataatatcactatcattttcgatcacctgttagatgtactttttcaaaaacttaatccccacaacagctctcattctggagatgaaaaacacagcctcagatgggctctgatttcatcaatctgggtgattctaatgagcagcaggggtaaaaatctagagcctaaaatttaacttgaaattgtttttccctcctaaaaggagactagtgagcctgaagcattataatcagtcctcttgtcttcttctttcaattgcctcactacctacaatcatttaaaatgaattttaatgcgtttcaatgatattccattgtgagcatcagttctgagatgctaagtatccacctaaaatgatatccttgtcgagcacatactttagccagttaatgtccaagggacttctcatttcattaaatgtcatgttgcatttaattctcatgacaacctgggatagtagatattattatttgcctcattttgtgaatgagaaaatgagtctttggagaggttaaataaattgcctgagatcttgcagctaataaaaggcagagccaaggattgaaaaatggttctgggctgggtgcggtggctcacatctgttattccagcactttgggaggctgaggcgggtggatcacctgaagtcaggagttcgagaccagcatggccaacatggtgaaactctgtctctactaaaaatataaaaattagccgggtgtggtggcacacacctgtagtctcagctacttaggaggcaggagaatcgcttgaacctgggaggcagaggttgcagtgagccgagatcgcgccactgcactccagcctgggtgacagagcaagagactccgtgtcgaataataataataacagtcctagggtgttctctcaactcctctatccaatgcctatctttgcttcaggactcagcccaagatctacctcctgataggaagtcctccctgacaaatccagcatttgttgactcaatcgcttctaaactgttataattagaccaatgcagctatcagttgttgaatacttagtatacacaaggcatcttttattcattatctcaaaaccttctaacactctttttttttttttttttgagatggagtctcgctctgtcggccaggctggagtgtggaggtgtgatctccactcactgcacgctccacctcccaggttctagcagtatccctgcctcagcctcccaagtagctgggattacagatgcgcgccaccatgcccggctactttttgtattttttagtagagacagggttttgccacgttggccacgctggtcttgaacttctgacctcaggtgatccgcctgcctcagcctccaaagtgctgggattacaggcgtgaggtaacactcttgagtgttagaaattattgctttaattttacagatgaggaaacaggctcagagagccttccaagctcctgcagctaaccagtagcagagccagaattcaaaatcagatctgggtgagcccaaagcaggagttggcaaactaaggatcatgggccaaatccagcccactcattgtctgttttggtaaataaaattttgctgaaacaaaatcagactcactcatttacataaccctgatggctgctttcaaactacaatagcgacattgagtccctgcaaacaagtctatgtggctctcaaagcctaaaatatttactatctagccctttataaaaagtttgcttgtaaacgtttttgtttttatagaaaaactcctgcttggaagcctgtttttcttgccacttcatctttcttcttctctgtatgccactgctattatagtattgaagttgtcactcttgctcccagcaggtggaaggacagcatgcttctcatgaaaaggacctcagtaggacactcacagaagtccgggcaactgggacagagaccacgacccccaggaagggagtggtcaatcaacacagggatcaccagtacaggagcctctgtttggaaggaaggtcagaaagatcctgtggccttgctctaccaatttttggcagcctgcctggccacatccctacctcccagaggcccatgctctgattcctggatgtcaccctgttctctgcaggtgccagcaatgttgcttttgcatactcccagggggcactatccacatgttccagggactccatctacatagttaccctgggtgctataattacctgggtgtgtctggagtgggtgggagagaggggtgtggctgttcttgggatctgcagtaaaagactctgtttaaagggttctgagagaggaggctgcgtcgtggggtgtaaaggagggagctgggactctgcagcttttggtctttgcagagcagtgggacttgaggaggtagaggaggaaatcctgggaaagaggttgagggcactgtcacgagaagacagtgcaaagctacacacacccagaccacataatatgaatattatatagagtttattgggggcaaagcctatatgcggtgaggtctcagagcaccctgctatgcccgagtcagcctaagccaccaaggatgaccctgcagtcagaccacgtctggctattgactcagtgcagtgagagggactgcacgttgagcgacatggagatggctcagcacacaaaggtcagcaaagagttattccaggacttgagggtgatgtgaagttaaggtgacaattaaatgaagcaggctcatagcaaaccaggctgtgtgttgtgagtcaacatcaggtgtgggctgggaaatggacccagggtcttgtttctttggaaataataattttttgtttgtttgttttgagatggagtctcactctgttgcccaggctggagtgcagtggtgccatcttagctcactgcaacctccggctcctgagttcaagcaattctcctgccttagcctccccagtagcttggattacagacaagtgccaccatgcccggctaattttagtatttttagtagagatgaagtttcaccatgttggccaggctgttctcaaactcctaacctcgggtgatccacccacctcagtctcccaaagtgttaggattacaggcgtgagcccccgcatccagccttttattcctttttaaaggctgaataatattcaattgtacatatataccacattttgtttatccgttcacctgctgacagacacatgttgcttttgtgttttagctagtgggtcaaagttaatactgctatgaccatacaggcacaaatatctcttcaagaccttactttcaattcttttttttttttttttttttttttttttgagatgaaatcttgctctgtcacccacgctggagtgccctggcatcatcttggctcactgcaacctcagcctccctgcgcacacagttcggtactacatatatcctctaggtggcagcataaccctcaatataaaaacccattctgagccccgcgcggtggcgcgcctggaatcccagctgcagctactctggaggatcgctagagcccaagagctgatgcaatgctccaggactgcacctgtgaacagccactggcactccagcctgggcagcagcgagaccccgtcaataaacaaacaaaccacccgattaggcgcggtggctcacttctgtaatcccagcactttgggaggcccaggcgggtggatggcttaagcccaggagctcgagaccagcctgggcagcatatagagacctcatctctacaaagaattaaaaaattagctgggcatggtggcacgcgcctgtggtcccagctactcgggaggctgaggtgggagggccacctgagcccagtttggaggctgcagtgagccgcaatcgcatcactgcactccagcctgggcgacagagccatactgtctcaaaaataaataagtaaataaataaataaaacataaaaactattttgggatcctgaccctttggtctttgaacttctctctcttttctttctttctttttttttcttcttccttccttccttttctttttctttctttcttccttcctttcttctctttctttctttcttttcttctttcccttttttctttctttttgagagagggtctcattgtcacccagggtagagtgagaggcactattactgcagccttgaactcctgggctcaagcgatcttcttacctcagcctcccgagtagctaggactacagctgcatgccagcacacctgacaattaattttttttttttttttttttttttgagacggagtctcactctctcccagtctggagtgcagtggcgcaatctcggctcactgcaagctccgcctcccgggttcacgccattctcctgcctcagcctcccgagtagctgggactacaggcgcccgccaccacgcccggttaattttttgtattttttagtagagatggggtttcaccgtgttagccaggatggtctccatctcctgacctcgtgatccacctgcctcggcctcccaaagtgctgggattacaggcgtgagccactgcgtctggccaaaaaaaaatttttttttatagagacagggtctcgctatgttgctcaggctggtctcaaactcctgggctaaggcaccgtctcgcttcagcctcccaaagtgttgggattacaggtgtgagccaccaggcctggcctggcctgaattttcttttttctttttttttctttctttttttcctttctttctttttttcttttttttttttgagacagagtcttgctctgtctcccaggctggagtgcagtggcctgctctcactcgctgcaacctccccctcccgggttcaagcaattctcctgcctcagcctcctgagtagctgggattataggcatgcgccaccatgcccggctaatttttctgtttttagtagagacggggtttcaccatgttggccaggctggtttcgaactcctgacctcgtgatctgcctgccttggcctctcaaagtgttgggattacaggcgtgagccaccgtgaccaaccgaattttcttagcacttttctttttaaatgccaaaggatggaacccagaactgtgagcttccttcagctctgtcagtggcttatctcaacatgagctaaatgtacaaaggtgctcttcctatcttactgctgtgatcgttggtcccatgttttgactgctggattgatttcagtaaggactcagggtatagattctagccttccttgaaggacagatgtcctctcaactaaactagaagcacactataactctacaatttttgaattctttttttttttttattttttttttgagacggagtctcactctgtcacccaggctggagtgcagtggcatgatttcggctcactgcaacctctgcctcccgggttcaagcgattctcctgcctcagcctcccaagtagctgggactagaggtgtgcgccaccacgcccggataatttttgtatttttagtagagatggggtttcaccatgttggtcaggctggtctcgatctgctgacctcgtaattctcctgccttggcctcccagagtgctgggattacaggcgtgagccactgcgcccagccccggccctctttttttttttttttttttttcgaggtggagtttcgctcttgttgcccaggctggagtgcagtggtgcgatctcggctcactgcaacctctgcctcccgggttcaagtgattctcctgcctcagtctcacgagtagctgggattacaggtgtccgccaccacccccagctaattttttgtatttttagtagagtaggggtttcaccattttggccaggttggtctcgaactcctgacctcaggtgatctacctgcctcggcctcccaaagtgctaggattataggtgtgagccaccacacccggcccccatttttgtattcttagtctctggagcacagttggttgaacaaatgaatgaatgaatgtattaccacaaggactacacaaggctaggcattgcctggcttggaaagagtctttaaattgctattatttatggaaacttcagtgcaccagccagatttcttggttgcaagcaacagaaataaactctggctctctttttttttgagacggagtctcattctgtcacccaggctggagtgcagtggcacgatctcgactcactgcaagctccgcctcctgggtccacgccattctcctcctgcttcagcctcccgagtagctgggactacaggcacccactaccacgcccagctaatttttttgtatttttagtagagacggggtttcaccgtgttagccaggatggtctcgatctcctgaccttgtgatccacctgcctcggcctcccaaagtgctggaattacaggcgtgagtcaccacgcctggccaactctggctctcttaagcataaagggagtttattggaatggcatggcagtagaatcatgagagtttgccttagttcgttttctattgtttataacagaatatctgaaactgggtaattcataaagaaaaggcatttatttcttacagttacagaggctgagaagtacaaggttgaggagctgtatctggtgagagccttcttgttggtggggactctctgcagagcccctaggcagtgtaagatatcaaatggtgaaggggcgaccatgctagctcaggtcttaattcttcctcttataaagccactgatgccactcccatgacaactcattaatccattaatccactcatgaggtcagagctctcatgatccagtcactgcttaaagccccatctcaatattgccactttggagattaagtttcaaaatcagtttggcaggggacaaacattcaaatcatagcagggttcaaaagcaggttcagacagttttcaaaatttgttttaattaaaacaattaaaaatttaaaaaagttaaaaaaaattaaaagaagcaggttcagcacacaggcaaaggaagccctggagggacaagaagtaggaagaacaaccaccacctttgagcatgaaaagtctggccagggcccaccactgtcgctgtccacctccacagctgtggtaaaagtcctaatttgggctgttctctcacctttgcatcatatgttcgcctttgcatcatatatcaaagggtggattgaccctttgacagaagctaagtcacattccaaagccccagctgccaaagtgtgagtgggggaggatctccccagtgcaactccctggcagaggaagtaccctgcatcctgccactcacacactggagcgtcccccagccagctgagcaggcttcgcaggggtgtggccatccgcctgctccaggcaagtactgtacagtccttcagtccttgctgccagcctctgcatcggtagttttttgtttgtttatttttttaaatcagcgctcatttcttctttttgacttcttggactagccgtgaagattgcaggcattcttagcctgtcttttagtaggaatgtttctaatgtttcaccatggagtgttaaggtttactgaaggcttctggtagctagattatctatttagtttgagggtcttccttggattcctaaactcactaagagttttcttttgagatggagtctcactctgttacccaggctggagtgcaatggcatgatcttggctcactgcaacctccgcctcccgggttcaagccattctcctgcctcagcctcccaggtagctgggactacaggcatgcgccaccacacccggctaatttttctattttcagtagagatagggtttcaccatgatggccaggctggtctcaaactcctgacctcaagtgatccgcccacctcgtcctcccaaaatgctgggattatagatgtgagccacctcgcccagccactaagagtttttgaaaacagaaatcagtatgtattttatcaaatgatttagagtacaaaattttcctctcttaatgtgttacgacaacagagaatgaccttgaaaaattttctaatgtagaaccagtcctgcatttctgagattaattcattcaacaagtcattcattcaacaaatatttattgaatgcttattatgtacaagtagtgttctcagcactaggaggaggaacaaaagagaatcaacagaacagcaatgaataaaacagaatcaaaattcctgggccataccaccctgaacaggcctgatctcccctgctctcagaagctaagcagggttgagcctggttagtacttggatgggaggactagagtgcctacctgcaggaagtatccattctagttggggggaaacggagaacttccattaaaacaatgtaaagtattctggagaaaaataaaacttggaaaaggaatatgaagagaagtgtgtttgtgtgatttttttttctttttttttttttgagatggggtcttgctctgtcacccaggctggggtgttgtggcgtgatcttggctcactgcacctcctctgccttctgggttcaagcgattctcctgcctcagcctcctgagtagctgagattacaggtgtgtgccactacacctggctactatttgtatttgtagtagagacgaagtttcaccatgttggccaggctggtctcgaactcctgacctcaggtgatccacccaccttggcctcccaaagtgctgggattacaggcgtgagccaccatgtccggcctgaagtgtgtttgagtgatttttaaacatggtggtcaggaaggaagtgcaggagagagccaggtgacttcctggaaaaacattccagacagaggggacagcaaatacaaaggttctaaagaagcaaaatctgggctgttcaggaaacagaaaggacagctgcagagctggagtggagtgagcaaggggaaagaagtgggaggtgataataggcagatcatgtaggtcactggaaagactctggcttttaatctgacagattaaaacgggaatcacgacagggttttgagcagagcagggacaggatgggaattacactttaaaaggatccctctgactgctctgtggagactatgctaaggtggagtgaaaacagaaccaaagagaccagtgaggagaatgctgcagtgattcaggtgagagaggaagatggcctggaccagggggtaacaggggagatgatgagagctaactggatttgggggtcgactggatctgcagaaagattggatagggtgtgtaatagagaagagtcaagaatgacttcaaagtttttgcctcctaatgttagattggacattaagatggtggagactgcaggaaagcaagtttagggagaaaagtaggaattgacttttgagcatattgcccatttgagatactatttatgagagttggatttatgagtatggagttctgaggagaactcccacacagcaagagatagaaatatgggagtcatcggctgggcacggtggctcacacctataatcccagcactttgggaggccgagatgggcggatcacgaggtcaggagatcgagaccatcctggctaacatggtgaaaccccatctctactaaaaatacaaaaaaattagccaggcgtggtggcgggtgcctgtagtcccagctactggagaggctgaggtaggagaatggtgtgaacttggcaggtggagcttgcagtgagccgagatcgcgccactgcactccagcctgggggactgagcgagactccgtctccaaaaaaaaaagagaaatatgggagtcatcagtctaccgatggtatttaaagccatgaggcaggaggagtttatgaggggagcaagtataggtagagaggccgtctaaagactgtactctgggccgggtgtggtggctcatgcctgtaatctcagcactttgggaggccgaggcgggtggttcacgagttcaggagtttgagaccagcgtggccaatatagtaaaaccctgtctctactaaaaatacaacaatttgctgggcatggtggcatgtgcctgtagtcctggctacttgggaggctgaggcaggagaatcgcttgaacccaggaggcagaggttgcatgagctgagacctcgccattgcactccagcttgggtgacagacgagactgcgtctcaaaaaaaaaaaaaaagactgtactctggggcacttcaaggtcaagagatcaggaggatgaggaagaaccggcaaaggagactgaatctgtgcagacagaagcagcaggagaatcagaggaatatgctgagaaaagtttcctattttgtctttttgagacagggtctcgctgtcactcaggctggagtgcagtggtgcaatcatggctcactgcagccttgatttcccaggctcaagtcatcctactgcctcagcctcctaagtagatgggactacaggtgcatgccatcacactggctactttttagtttttgtagagatagggtcttgccatgttgcccaggctgatcttgaactcctgggctctcatgatcctcccgccttggcctcccaaagtgttgggattacaggtgtgagccatcacgcctggctgagaaaagtatttttaagaagagggagtgatcggccaggtcaaatgctgctgaaagactgaataaaattaagaactgaacattcaccattggatgtggcagtgcagaggtcatttcatggagtaactggggtgagagtctgtgggaaggactcagcagagaacgggagaagataaatggagtcagcacatagacacaatgctttgagaagttttgcagagaatggaaagaaacaaataggatagtagctgggggaggagagaggctaagtgattttaccacatgggagaaacatcactaaatatatatattgttgggagtgacccagtgaggggagggattgatggtacaagggagcaggggagctgctggggccctgcctgagaagctgcaggtggtggatccagagctccaggggaggcctggctttggctcggagcctggaccgtccatccatggtgagaggagaggacgcagaattggggcacaattctgtgggtgggtggttttgcccgtgcggggaggcggaggttcactcttaaatgcttctcctggtttctcaatgattagaagtgaggtcagcagctgaggctaaggatggaggaggaagtgttggaggtttgaggaaagaggagaatgtctgaatagcttttctggagagaaagcaagagagagagaaagagagagaatggtcaacagcaacatagtaggatttttaggaagcaaaaagggctgcgtaatcatgaattctgaagcgagattgttttttctccagacacactgagctgaatgggtgctggctccagtttgtaaacgtttgctctttttattgaccttttgcacagaaccaatattttgctttaggccaggcgcggtggcgcctgcctgtaatcccagcactttgagaggccgaggtgggcagattacctgagatcaggagtttgagaccagcctaacaaatatggtgaaaccccgtctctaataaaaatacaaaaattagctgggccaggtggcgcgcacctgtagtaccagctactcaggaggctgaggcaggagaattgcttgaacccgggaggcagaggttgcagtgagccaagatcgcatcactgcactccagcctgggtgacagagcaagactccatctcaaaaaaaccaacaaaaaaaattgctttatcatcctccctttaacttctgcctttattaattatttctttaaagtgtccgagctttgagagttgaacatttggtttctttattatcagggttcttttttcctttttttttcttttttttgagacaagagtcttgctctgtcgcccaggctggagtgcagtggtgggatctcggctcactgcaagctcctcctcccaggttcactccattctcctgcctcagcctcccgggtagctgggactacaggcgcaggccaccacacccagctaattttttgtattttttgagatggagtctcactgtgtcacccaggctgttgcccaggctggagtgtagtggtgcgatctcggctcaccgcaacctccgcctcccgggttcaagcgattctcctgcctcagcctctgagtagctgggattacaggcacccaccaccacgcccagctaatttttgtatttgtagaagagacgaggtttcaccatgtaggccaggctggtctcaaacccctgacctcaggtgatccacctgcctcagcctcccaaagtgctgggattacaggcatgagccaccgcgcctagctaattttttgtatttttagtagagacagggtttcaccatgttagccaggatggtctcgatctcctgacctcatgatccacttgattcggactcccagagtgttgggattacaggtgttagccaccacacccggcctctttcttattttcaagcaaattcacacacagtaatacattttcctttgagtcgctttttgccaacatctcgaagggtttgagagatacttttcatgttgaaatttctttctctctctctttttttttttttttttcaaataaatagagacagggtctgtctctgtcacccatgctggtcctgaactcctgggcccaagtgatcctcccacgcctcagcctcctgaagtgctgagattacaggcgtgagccattgtgcccggcctcatgttgaaatttctatctaggtggggtgcggtggctcacgcctgtaatctgagcactttgggaggctgaagcaggtggatcacttgaggtcaggagtttgagaccagcctggccaacatggtgaaacaccatctctactaaaaatataaaaactagctgggtctggtggtgggcgcctgtaatcctagctacttgggaggctgagacaggagaattgcttgaatccaggagatggaggttgcggtgagctgacatagtcccactgcactccagcctctgcgacagagtgagactccgtctcaaaaaaaaacaccaaaatttctatctaaagagtttgtaatttttttttttttgagatggagtctcgctttgtcacccaggccgaagtgcagtggcacgattttggctcactgcaatcttcgtctccctgggttcagtgattctcctgcctcagcctcccaagtggctggattacaggcacacatcactatgcctggctaatttttgtatttttagtggaaacggggtttcaccatattggccaggctggtctcgaattcctgaccttgtgatctgcccgccttggcctcccaaagtgctgggattacaggcgtgagccaccgcctagactttgtaattttgatgtttatttcctctttcctctctgacttgagtactttattttgttaagttgtggttaatttctaattttattttattgggggtcagtgagtatggtctgtgagattgttgctttttggtattttttgagattttttggattttctttctaattttttggagatttttttggtctaatatttgggaatgcatatagcactgtaaacttatcctctaaacatatagcaatgaaatataaaaaaagcaaaattggctgggcacagtggctcacgcctgtaatctcagcactttgggaggccgagatgggcagatcacgaggtcaggaattcaagaccagcctggccaacatggtgaaaccctgtctctactaaaagataaaaaaaattagctgggcgtggtggtgcctgtctgtaatcacagctacttgggaggctgaggcagatgaatcgcttgaacccaggaggcggaggttgcagtgagccgagatggcgtcattgcaccacagcctgggtgacagggcaagactccatctcaaaaaaaaaattaaaaaacagcaaaatttactttgtaagtagactcaaagacatgaaatgtatctccatggactaagatatagggacagaaatgcaaagtggggagttggcctgaagaggttaaagctctggactccaagtctggaatcaggtagggaatgctgggagtttgactctgggtaataggaactgaaacagcccacggaagacggcagtagacctgaggcaggattcctggttacgcttttagggagtgggagggtggggaactgagctaagtatagtgactgaaggggtcccagagacccggtggagagaacggtagcattgctgggcagggcggatcaaggctgcccagttgaaataagcctgcaaatagaaactccaaattcaacaatccaaagacaagcacactataagtagggtgaccgtatctcctgctttcccagaaataatctcagtgcacaatgctagtcccagcatcatactactgtcagcctctttcattcttacagtatcctggtttggatgatcaattacatggtcacctaacatatgaaattaaagtagtagaacaaggctgggcatggtggctcatgcttataatcctagtaatttgggaggctgaggtaggaggattacttgaggccaggagtaggaggccagcctgggcaacatatggagaccctgtctctacaaaaaaattaaaattaactgggcatggtggcatgtgcctgtagtcccagctactcaggaggctgaggcaggaggatcacttgagcccaggatttggaggttatagtcagccatgattgcaccaccgcactccagcctggtcaacaaagcgagactctgtctctaaaaaaattaaaaagtggcaggtgcctgtaatcccagctactcgggaggctgaggcaggagaattgcttgaacccgggagacggaggttgcagtgacctgagatcgcgccactgcactccagcctccagaagtgacacagcgagactccatctcaaacataaaaataaaataaaataaaataaaataaacagtctgaagaaaagaattgaaaatggacttcttgtgtagatatggggatcttacaaattacccaagagtaccaagaaatataagaaacacaaacataagcactatctttattaaaactacagattaaaactccaaaccatgccaggcgcggtggctcacgcctgtaatctcagcactttgggaggctgaggcaggtggattacctgaggtcaggagttcaagaccaccctggccaacatggtgaaaccccatctctactaaaaatacaaaaattagccgggtgtggtggcacgcgcctgtaatcccagctactcagtaggctgaggcaggagaatcgctcaaacctgggagacagaggttgcagtgagctgagattatgccactgctctccagcctgggtgacagagtaagactctgtcaaaaacaaaaaacaaaaaccaaaaaactccaaatcataaaccaggtggaggctgacagaggtacttgagattaagcaggagaaaaccagagctcttgtgaagaaccagccgagctcactagcaagatgggggctgacctgggaatagggtgctttacacatcttagaagaacactgaaataacgtattagaacaaatgttttcaacttcagaaaaattaccagatagaaagaggaattgaggctgggcatggtggctcacgcctgtaatcccagcactttgggaggctgaggcaggtggatcacttgaggttaggcgttcaagaccagcctggccaacatggtgaaaccctgtctctactaaaaagacaaaaattagccaggcatggtgccacgcgcctgtagtcccagctacttgggaggctgaggcaggagaattgcttgaacccgtgaggcagaggttgcagtaagctgagattgcagtgagactctgtctcaaaaaaaaaaaaaaaattaaatctatagagtcaatctattgtgtcccaggaaatattggcccagaataataattccaaaatgtataacagtgagatttctggatttcatagacaaagagataattcttggagcatcatggcaattacttcacttctttgttttttttttgtttttttgagacggagtctcactctgtcgcccaggctggagtgcagtggcgcgatctcagctctctgcaagctcctcctcccaggttcacgccattctcctgcctcagcctcccgggtagctgggattacaggcgtccaccaccatgcccagctaactttttgtacttttagtagagccggggtttcaccatgttagccaggatggtctcaatctcctgacctcgtgatccacctgtctcggcctcccaaagtgttgggattacaggcatgagccacggtgtccggccggcaattacctcatttctgaggaaaaataaaccaggctgacttctggtttcattacagcaacactcaattctagaagacaatacttatacattcttcaataaataaagtataacccaagaatttatactcaaacttttacaggataaaggcaacaaatatttttaaacatgaaaaactcagggaatataattttcataagttattattgttattttaaagagataggttctcactttcttgcccagactggggtgcagtggcacaatcagaggtcactgcagcctcaaacttctgggctctagcaatcctcttgcctcagcctcctgagtagctgggactataggcacacgccactacgtctggctaaattttaaaattttttgtagagacaaggtctcactatgttgctcagggtggtcttgaactgctggcttcaagcgatccttctacctcttgtctcccaaagtgctgggattacaaacgtgagccaccacactctgctctataaattattcttaagaaactaaagcaggatcataacttaccacaaaatgggttggggaaaaaactatggcaaaataactgttaataatacttctgaatcttttaactgtaggagtggaactaaaacaaacgtgggattatggttacacagcagaatgtatgattttataaacctactaacgtggaaatggtataattaacatcttttatatctaggaatccaaatatctcattcaaagctgatttaaaaatcaagtgataaagatatttataaatgtagttaattaaaaaagcaaatactaaagaaggataaaatcatttacattaggtgaggagaagaaaaggggtaaagaaaaaagagggaaattacaatgtcatttttattcagaatagggagttaacagacagtctgaagaaactgaggacgatgtgtattgcggagtatgattataaggcaactccctgaataaaaatacaaaccttccaaattatcagaagaaacacaaaacacaataaacacaaaatatgcaatgcaagagtgaaaaaaggaccaaaagggctatgaaacagcataatatagctgtcacatgaatagggctcaactcatctatggcaagataaagattttcagatttaatcacaaagcaaaacttagtgctctaattcaagggattacctaaaataaagggttcagaaaagacgaaaacagcaaaggttgtttggggtaacaaacaaaattcagcaggatggtaaaatatcagacaaagttaaattcagggcaaagtttgaacacattaaatgagacaaggaaggtcattttatgatgaagtgggaaaattcccaagaatataagacaaatgaatatttatgcacaaataacatggtactatttataaagcaggacttcagagaaataaggagaaataaaaacacaatagtaacaaaagattctaatttaccttcttccgattacgttagatcaaaatacgtctaaaaaataaaggagaaaaaatattttaaaaagaagaagaaaaaagctccagtataaccaaaaacataaacctaagagctgattctttgaaaaaaaaatacacttttaaaagttaacaaaataaagaagcaaaaatacacaaaataagatatttgggagaagttaaaagattcacaaaagactactttcctcaactttatgcaaatacacttgaacatctggaaaaaaaggataatttgttttaagaaatacatgctttatcaaaattaactctagaataatttttaaaatgtaaataataaaattgccacagaagaaacttttctagccttaaaagatttaccctccccaaagaaagcatcaggctgggaggaacatttttaactgggaaatgatcaaacctcaaagaatagataattttaatgctccttaaattgttcagagtaaaaggaaaaagcaaacatgcccatttttttttctttttttttttttgtagagatgggggggtctcactgtgtttcctagactggtctcgaacttctggcctcaagcactcctcctgcctcggttccaaattttttatgatgtgagcataacattgattctgaaaccaaacaacattagacattcaaaaagaaaattattgcccatctcatttttgcatatcaatgcaaagcctgtaaataaaatattagcaaacagaatcaagcagtatatttaaaaaaaaaagacaagtttattgcagggataaactgggtttttattaggaatttattataactaggactcattacttcaatatgaggaaatcagctgtcacccggtttgctcgtccttacagacatctccctcctcttcctctcttcctttccagtgaaaatgtcttcaagtttcctctaccaaaccaaaacttcaccccacttcttttattctttcctcctctcttctcagaacaaaggggttgttgctgaccagcccagggtttcttatttggggccggatcattcttccttgtggggcagtcctgtccttcaggtaggatgttgaggagcaccctcgtgtctacccacttaggcaacagtagcaactcccgcatcatgacaaccaaaaatgtctccagacctccccaaatgtacgcggggcggcgaggaggggcaacaccggccctggtcgagaaccgctagcctaggctcgcccctctacctgggcgccacaacttgccagggttggttattctccctggatcctttccttcctcctcatttgagcttcacgccctcaagtatgaccaaaggttctgtcattccactcctgcagttttcattaaggtcttaggccacttccatgtcaagaaacacagtggctctttctaacccctggccatgaggcacccctggaggaggagccgtgagggtagggaagatgctgagggggatgttgaccttgccgacttccaggcgcctccgctgcatcccggaggaggcgttgggcggtgagggtgcagcgggggggcgggccccgcaggatgaggtgtccgtgtgcggctagcgccacaggcaagaccgggctccttgcggggcggaggtgaggccgtgagcatagctctcaaactggagggcgcctcagaatcacttgacgggcttgcgagaatgtggactgctgggccccaccttcatggttttagtgcaggaaaaaccgaataggctgggtgggacggagaatctgcattttctcaagttcccagatgaggctgaagctgctggtccgggcaccacccttagaaaacctccagtgtagagtgcggaaatggggtccacatctggcttgggacgcccaaacatcgattatgtgcgaccagaggatgagcagatagggagatgagacactgagagctgggagagagggggcccccggccgccggctgaaggaggacggcgcaggcggcggtccgggtactacatctcccagcgagccccgcgcggctcgcgctcgccccctggcggcgatggctggaggcgccggcggagcgcgggtccctctcctgagcatcagtgagcgcccggagccgtggccgctgggggttgcggcggcgctgagccagcggggccggtgagtactagccgcgccgccagcccgcccgccggccggctctttgcgcctcagccgcgtggtctgaagggatgggcgggcgagcgcgggggtccggcagtccgtcgtgggggcacgggactgcctttctgggaaggcgtgctgcgtcttcgccgcgggggccccggtcccctcgtcgcgtgtcctgtccccagcccaggagggacgtcctggcctgtcctgcccggcccggagcggtgggaccggtgccgcaggtggcagcggcaggtggccgcctcctcccctccgggcccgagggttgtcgcagggacccgggactgagagccaggtggctcccgacagctgcggccctggaggcgaccccagccctcgccgcagtgggacaggtgcgcgggcacgcccggccccggctcctgggtctcgggagcctcccgcaccctccctgttgtgccttgggggtgctgcgtggtgcagaggaccgagaagcccttcgccctcggcgtccgccgcgctcccgccccttcctggccggggtgacaggggaagggctagggctgcgcatcccgggtcagctggggcgccgcggcgcagtgcacctggaaggcccgggggcagcgcgcggtgcccgtgggtttcccggtggtgcggacctgcgggcgtgcggaagtaacgacctccttccccagtgcccatgcaaggaaattagtgttatgtgcttgctttttttttttttttttcctaaggaagtttgactctgaatatcttattttgctggagctccatttgccagcacgtaagtttatgtaataagcggcatacagttcggaaaaaaattttcctgtgaaagtgctcttccttgccctctgcaggaagaattacgccgagctggttggcaggcttatccaccagcaactgtaggagctgcaggcagcagataaagtgttttttgagtaagggcacaagtcagcccttcaggacaatttttgtttttggaagattctgttatccagttccaaacaccgtgttatttcagtgttgaagatgggggaggagggaggagcacaggcttgtcaatcctaatacctcaacagaaattagctttgcaggattaactctccaagcaagcgagttgaatttggtagcccaaactacagctgaagctgagcctccatactaaagcctgtctcagttttaatagtttttcgcttgattcgtttgcctcttccaagtaggtgatcttattgtctgttaaacaacagatgtctctcatgtttttacttttttccttgtcttccatagattactctcgctgcagtgttgactattgaggttaaataggaatctttgtcttgggcttggttttagggagcattccctctgtatcttcaccgagtgtattctatcacattaagtacatttctgtttatgcctaattactaagagtttaaaaagtcaagggtgggtgttgggttttttgcccaaatgcttttgtgtagcatgcattgatatgatcatgtagattttcgtcttaaaattgttaacataagtggtggtcacattgctagattttctttctctaaaaccctgggctaatttaaaatgcacttttggattgttcacatcaataagctagcatcttatttagggttttggtatctgagtttggcatatagtttaccccatttttatctgtgttcataacaaggatcaggctgtcctctctgattaaattgggaaactttccatcattttctatgctctggaatagaagaattatctgttccctcaagtttggcagaacttgactgcagactgcctgggctgctgctggtgttgtttaggcagttaatatcagtatttaattaccttttcatttttttcatgatcatttatttttctcagtttttctgtttcttcaaagtaaatttaatattttctgttttcctagaaaatcattaacattattgaaatttaatatatgctagcataatgttgtatatagtattctggtgtaagaaaacagactcttacatatctgtatgtatctgtatgttctctttctgatacagtactttttttggtaccttttctctttttttttgatcagacttgcttaatgattattttattaatcctttcaaagaaccagcttttattaaccaggatttattgattaattctattgattttttatttttctatgacattaatttctgttttttatctttctacttaatttgagtttattttgttcaagttttaactgtttgaatggaaaacctggctcatttatttaatcagtcctgtgaacaaggcaaggacttctaattctttcattccacttacctcacatttggccttaattgtatttttacttcaacccttccaacgagacattattgctattgtttttgttattttctaggtcaacatttattagctttatctacctgtttaccatttcttcactttccattccttcttgtatcacagatacttttctttggaacatttttcttctccctcaagtacattctttagaaattacttcagcaatgatcaattttctgtttttgtaatatctgaaaatgcctttattctccctgtattctagaattttggtttcaccatgtgtcttctattgatttcagagttatttttgtatttttttatatttttaaaaagatgttttgtagctggaaggtttttaggatctctattctgccacagtgctgaaagaaaaacaaagattaagaacagattaatttgcagtccactgtcagtcacgactgttccctgaactcttagtatattgggtatacagttctatattaatctcaagtttattgatggtaattcaggttttctgcatccttaacttattttttttctctgtttgacctgttgatatggagagttgtattgaagactcccattatgattcttgtaggggtttttgtactatttctatgtttaatatatatttttctttaaatgttgtatttttgaagctgttttatgtgcttaaaggttcacaattcttgtatcttcttggtgaattgtaccttttgggaataaacgagccatcttatttaattttttttttgttcattctctttatattgctgtacttgctttttgttagcatttatatggaatatctttttctagtcactgattttcaattttctgtgtcttctttaattgttactcttaccattagcttatggctggattttgtttaattagttaatctttgtcttttaataaatattgtggtaaaataacataaaatttattatttattatttttatttttaccatttactacttttaagtttacagttccccagtgttaagtgtgtgcacattgttatgcaaccaatctccagaattttttcatcttacaaaattgaagctctgtatccattaccgcagcccctggcaaccaccattctgctttttgtctctatgaatttgcctattttaggtaccttgcatgagtatctaatatagtacctcatatagtatttgtctttttataactggcttatttcatttaatgtaatgccctcaaggttcatccatgttgtagcatgtgtcagaattttcttcatttttattgctaattaatattccattgaatgtatacaccacattttgcttatccatatatttatcaaaggatatttatgttggttccacatcatagctattatgaataatgctgccatgatcatgggtgtacaaatatctcttcaagaccctgctttcagttatttgggtatatacccagaagtagaattgttggatcaagtagtacttctatttttaattttttgatgacccagcatagtgttttccgcagaggctgaaccattttatattctcaccagcaatgcgtgagaatttcagtttccatacatccttgctaacatctgttattctctctctttttttgatagtagctatccttatgggtgtgaaatctttgtcttttaataggtagctttagcccatttatatttattttgattactgatcttttgcggattattcctgtcatcttattttatatttttgatttccttttttgagacggagtcttgctctatcgtccaggctggagtgcagtggcacgatctccgctcactgcgacctccggctttcgggttcaaacgattctcccaacccagcctcccgagtagctggaattacaggcctgcaaccactatgcccggctaatttttgtgtttttagtggggacaggttttaaccgtgttggccaggctagtctcaaatttctgacctcaagtgatctgcctgccttacccgcccaaagtgctgagattacaggcatgaaccactgtgccgagctggttcatttcattctcattgctgtgtatatgccattgtatatatccctaatatagatatacatttgactttgattggcagttggttgtttgcatttttggactattatgaatagtaagtacatgaacactctagtacacgtcttttgttgagtgagtgtgtgcatttctgttgagtgtgtatctgggagtggaactgcttggttgtagtctgtgcatgtgctcggttttagtagatactagcaaacagttttcagtaccggttgcaccaacttatttaccccagaagtatatgtggttgctccacattcttgccaactcttggtaatttctgtcttttaccttttagttattctggtggatactgtggttttaatttggattttcctgatgataaatgaatttgcactgttttggtacccttagtttttcacacatatctaaacatttttttctcttgctattaaaagataatctgtttatgtgaactctccatgagtaaagcaaaaaagaatcttatcatgattttaattctgtcccatattaaatttttgggttttcatacattatgcataaacagttatttaggtaaactgtaaatttttctgattatttactcatcattggtgcttttatttcatttgttttcttaatgagtccttaagtgattatttggttttgttttcagggattctgtgaatggtaaactttctgaacccttgcatgtttaaacaatgttttttatttcacttttccatgtgaatattcttgactgggtataggattctacgttaaaaccttctgaattttggagatattgctttatctgctggtatctaggaagaagtgcacgcgtctgactctcgtttctttgtagttaatgtttattttctctgaagctttacaattttttttctttctccttggtgttctaaaatttaactattatttgtctaggagtggattttttttttgagatggaatcttgctctgtcacccaggctgggagtgtggcatgatctcggctcactacaacctccacctcctggtttcaagtgattctcctgccttagcctcccaagtagttgggattacagatgtgcaccaccatacccagctaatgtttgtatttttagtacagacagggtttcaccatgttggcctgactgatctcaaactcctgacctcaggtgatccacctgcctcggcctcccaaagtgctgggattacaggcatgagccactgcgcttgggcaccacactggcttaagagtggatctcttttgttcttcctgctcagcatttggtagtccgtttcattctaaagattaatacacatttctatggcactggagaagttttgagtgtttccttgcctctattctattttctgcttctggaattattcttacttgggaattagaatatcttgatttatctttcatgtttcttgaaataagcatttttttctctcaaatattctgtcttttttaatttaattttttttttttttgagacagagtattgctgtgttgcccaggcctggagtgcaatggtgtggttcaatgtgacctgcaactcttggactcaggcaattcccctgccataccactgtgcccagcggaaatgctctctttatctttatgggctgcattctgggatgttccttgggctggttttgcaggtcaccaatctaatatttagatttgttccgtcaactctttagcccatctcttgagtgtttttaaatattgattatcatatttttaactttccgggtctctattttttttttttttttttgaggtggagtctcgctctgtcgcccaggctggaaggcaatggcactatctcggctcactgcaagctctgcctcccaggttcacgccattctcctgcctcagcctccccagtagcgaggactgccggtgcccaccaccacgcccggctaattttttgtatttttagtagcgacggggtttcactgtgttaaccaggatgatctcgatctcctgacctcgtgatccgcccgcctcggcctcccaaagtgctggggttacaggcgtgagccaccacgcctggccacgggtttctacttcttaaagtttaacttttgaaataggtaagataggcagggcgcagtggctcacgtctgtaatcccagcactttgggaggccgaggcggatggatcacgaggtcaggagattgagaccatctggctaacatggtgaaactccgcttctactaaaaaaaaaataaaataaaaaattagctgggcgtggtggcgattgcctgtagtcccagctactcaggaggttgaggcaggagaatggtgtgaacccgggaggcggagcttgcagtgagccaggatggcaccactgcactccagtctgggcgacagagagcgactccatctcaaaaaaaaaaaaaaaaaataggtaagataatcagtgttcaaaaccagactgtattaaaaaggcataaatgaaagtgagaggtgacagcgtgctggcagtcctcgctcgctctcggtgcctcctcagccttagtgcccactctggccgcgcttgaggagcccttcagcccaccgctgcactgtgggagcccctttctgggctggccaaggctggagccagctccctcagctttgcagggaggtgtggagggagaggcgcgggcgggaaccggggctgtacgcggtgcttgcgggccagcgtgagttcccggtgggcgtgggcttggcgggccccgcactgggagcggccggccagccggccccaacggccccaggcagtgaggggcttagcacctgggccagcagctgctgtgcccgatttctcgctgggccttagctgcctccctgcggggcagcgctcatgacctgcggcccgccatgcctgagccacccccacctcctgggctcctgtgcggcccgagcctccctgacagcaccaccccctgctccacggcgcccagtcccatcgaccaccagagggctgaggagtgcgggcgcagggcgcgggactggcaggcagctccacctgtggcactgatgccggatccactgggtgaagccagctgggctcctgagtctggtggggacttgagaacctttatgtctagctaagggattgtaaatacaccagtcagcaccctgtgtctagctcagggattgtaaacgcaccaatcagcactctgtcaaaatggaccaatcagctctctgaaaaatggaccaatcggttctctgtaaaatggagcagtcggctctctgtaaaatggaccaatcagcaggatatgggtgtggccagataagagaataaaagcaggctgcccgagccaagagtggtaacgtgctgcggtcgcattccgcgctgctgaaggtttgtccttttgatgtttggaatgcgttcttattactgctcactctttgggtctgcactgtctatatgagctgcaacacacacctcgaaggtctgcagcttcactcctgaagctagcgagaccacgaactcaccaggaggaacgaacaactctagatgcgcccccttaagagctgtaacactcgccgcgaaggtctgcagcttcactcctgagtcagcgagactacgaacccaccagaaggaagaaactccgaacacatccaaacatcagaaggaacaaactccagacacaccgcctttaagaactgttacgctcaccgcgagggtccacggcttcattctccaagtcagaccaagaacccaccaattccggacacaaaaggtgttcccaccattcctgtcctcttacttctctcgccttacaagtaggtaaccattgttgttagttacttatgtaccttccaaagtttcttcatgcaaatacaagcaaatatgaatcagattctccatttctccttttttgcacaaatagtagcattattctctatctggtcttcatcctgtgtttttatttcttggtatatcacaaagatcgtcacataccaactgcttgctctttataatgtccccttaggtcttcccaagaatatctaataatttcttctatgtgctctagtaattatctttgcttgggtttgtgttctgttgattcagtgtccctgtttcatcatactgaataaaaacttggtgattctttatgtgttcatcttcgaagtttgagaattccttttttcctgtcttactaggcgtagcgtgcctcctgtgattgttgaagagctgtggtgtgctgctgagtggcgtgtgtattccatgtgaggggaagggtccaacagtcctggtcattcagactgcagttccccaggtaatcaccttgtcaggttctacctctgctgttctatctgctgttacaagtctgttcctggaaacctgttaccatttccttctgcataacagcctcctcccaagcttgtattgggctatggtttgctcaggtaatctggttctgagtactttttacttttcagaaatttcctagacattttagttggccatcggcactcttgttttccaggtttcttttgatttagtgttttaaaaatgtttctaccattccattgaattttaagacacttggaaggcagaagtatgtgtttagtttattgttttggggacagggtcttgctctgtctcccaggttagagtgcattggcgcagtcataggtcactgtaactttgaacttttgggcttaactggtcctcctgcctcggcctcccaaagcgctgagattaccggcatgggccaccatgcccagtccttggtcttttataatttatttctgtgttgggggcccccaggaccatgctcagatctggtggttcacttggaagactcagcatgtggtgtactcacggctgtaatttattacagtgaaaggatacaaagcacaatcagcaaagggaaaggtgcatggggccaagtccaaaggaagccaggcacaagcttccaagcatcctctcccagtgcagtcacacaggatgtatgtgcttaactccccgaggaaggagctgtgacaacgcatgtgaaatgctgtctaccagggaaactcactagagacccaacacccagggtttttattgggggctggtcatgcaggccccctttgcccagcacataccacattccacgctacctgaagaaaagcaggagttcagcataaaccacacaataatttaggcacagtgagtccctctttccaggttggatggtgggaacccttctgaaatctaagttcccaggtgccagccaaggattaaccatgctttttatgagactttttaagaataacagtcttgggccaagcacaatggctcatgtctataatcccaacactgtgggagaccaaggtgggaggatctcttgaagccaggaatttgagactagcctggccaatacagaagaccctatcattcatttatttatttatttatttatttatttatttatttatttatttatttatttattttaaaaagcagtcttaggcctgctgtgttaactcttttctgtaagattttcctcctgtgttcctcagaaaaagatggacactttacctagaaatgacttctcccagtcagatggtcatgaatttttttgccttctctgaagagagaacacatttgtattaaggtgaaactgagtggagaacatttcctgatgttggagaaagccatagcatggcacgtgctcagcagccttgagagggtgtcagtgagagagcacagagggactactcaaccattcaaaattattttgaaaaggcaaggatccttttgaactttatctgcaaattccatgaggtgagaagtttagctcaatatagctggaaagttgagattgggttctgtgctgatagcaggaatgacacgaaagagctgaataaaaaatccacacatggtctttaattagccatatacagatggtagtggcccatcatccagctcagagatctgccacttctcttccagctttcccacggagccaccctgatcacccccatccatgttggtctttcttccccaaatggccatcagctctgctcacagggcctttcatcactggcttctttgtcactggcttcttttccgtggttttattggatagtttttgttgcctcattgtgtataatcttccacaagattgggaattccttgaggaatgaacagtaagtcatagttatataccccatgtctccctgcagggtgacatgcatagagctggtgcctattaatgttttcggaaagaaccactagaaggaagtaagaagcagccttttcttcattctagtcactgcttcacatgcagctgatttttattctgtgttgagggtggtgatataaaacaccacgctgacattacctgtttgagttgtctgagttctgtctgcagcagatggtgtaattaaatgttttagtttgaaaggcttttcaatttcattcaatctgagtgtgggcttagattgtcaaatcatcttttctaactctaaaggctgtatctagtcagcctggatctagtttcctccctttctctgtttttttattttttttatttttttgagacagagtcttactctgtcacccaggctggagtgcaatggtgtgatctcggctccctgcaacctccgcctcctgggttcaagtgattctcctgcctcagcctccagagtagctaactacaggcatgtgccaccacacctgggtaattcttgtattttttgtagagatgggctttcactgtgttggccaggctgatctcaaactcctaatcttgtgatccgcccgcctcagcctcccaaagtgctgggattacaggcgtgagcctccacgcctggccctccctttccttggttttagacctcaggtgtgaggaattgaattaattatattctcattcttagccctttatcatcactggcccatgcaagcccctctgttgttttgcttgttaatgcatttgttggtttatttgttcattccgttttatcccactctcattctcttctccctatagacagctattctaatgaggttcatataatacttttgtgtatatacagttgacccgtgaacaatgagggggtcaggggaactgattgcctgcacagttgaaaatctgtgtataacttttgactcccaaaacttaactactgacagcctactgttgagtggaagccttacccataatataaacagtcaattaacatttattttgcgtgtgatgtgtattatgtaccatattcttagaataatgtaagctagagataaagaaaatcataaggaagagaaaatatacttttcattagttccttggaattggattatcataaaagtcttcatccttgtcatcttcatgttgagtaggctgagggggaggaggaagaagaggggttggtcttgctgtcttgggggtagcagaagtggaagaaaatccacatgtaagtggacacaggcagttcaaacctgtgctattcaagggtcacgcgtatactgctttgtgtgcatctatttttaatttacatgaatggcatcatgttctagcctttattctgtatcttaggattgtcactcaccacccatctctgttacttggtgattctggtcttaatatccaccacattttgtccatctcgtctcctgtagatggacacccaggttgattcccactcccagtaatgctgaatgagcctcgtacatgtctccttatggacttgtgtgagaattctttgggatttagacccaggagtaggactgcctggtcgtggtgtgtgcctatacttaatataaccaagtactgccagattgctgtcaagggtggctgcaccactaccttccccagcagcacacaaggattcccaaggctctgatatatatatatataatataataatatatatatatatatatatttttttgtacttttagtagagaccgggtttcactgtgtcggccaggatggtcttgatctcttgacctcatgatccgcccgccttggcctcccaaagtggtgggattacaggcgtgagccactgcacccggccatcccaaggccctgatctttgcatgcgcttggcatcattcaactttctagactttagcagtctctctctttttatttatttactatttattattattataattataattattattatattttttgagatggagtttcactcagtcgcccaggctggagtgcagtggcatggtctcggctcactgcaatctccgcctcctgggttcatgccattctcctgcctcaacctcctgagtagctgggactactggtgcccaccactacgcctggctaattttttgtgttttcagtagagacggggtttcaccatgttagccaggatggtctcgatctcctgacttcatgatccgcccgcctcggcctcccaaagtgctgggattacaggtgtgagccactgtgcccggcagcagtttccctctttttatttgcatctgtctgtttactactgaatttgagaatgcttttatatatgcttgttatctttttgagtttccattgacataagttgcctgttcatgtcctttccccatgtttcaactggaatccaatatagactattttagacattagccccttgttgatgtttcgacagtgcacatagtttctcctaatatgttatacgtcagctttttggttggtatctgtgttggataagaatccttaattctataacctgaatagtcaatctgccccatgaacttacttagttttaccttttgacatgtctgttgacaacatttagtaatcaagatatttcacataaaaatccagattcctagtctctcttgaaagggtgaaaagtatttcagtcctggctagagtgactgaggggtgagctcctgctgttgctagggcctgggctgcctacccacctgtcctcactcattctcttgacctcctggccactagtgtcatttgactttatgaccagccactgctgtatgtgaggcaataccttaaggataaacaagcatggtgatgatgttcccaagattgcttggacatggttatggagtgggtggactcggcattgagaacacagtagtagctgctgcatctcatgacactattggatgggtgtcagcatggcagcagaatactgacggactgtgtgcacattctttcagcagtaatgattcattcttttcaaccttttctggatcggctcattcctttttgccaaaaaaaaccaaacaaacccaaaaaactatggtttagtgaaattgcatatgaacaagagttctaaacgagggatctgaaaactttttctgtgaagagctatagagtaaatattttaggctttgcagggccgtgtgttcccttggaactacttagctctgctcctgtagtgtgaaagctgctataggttgtatgtaaatgaacatggtctcttcatttggtctggatttgggctgcagactgtagtttctgatccatgttctaaaccatagtcttaagacttaattttgtcttccttctcttgtttttaaggtgcaaggttatacataacattttgctaatgaatacatggtaagtacctactaggtactaggtgctgagattatagtgatggacaagacacaaatccagtctattcagcttaatgtctgggtggggagacagatgagggagcaggcaattactaaagaggatggcaggccaggacacgggagagcacacaattgggcagcaggggttgggagcagggcatgtcaggtaagacgttctagaagaaggtgatgtctaaatgaagggggaagagggcgaggcaggataatgcaaaggtccttttgaacttcatctgcaaattccatggggtgagagtatagctggaaagctgagattgggttctgtgctgatagcaggaatgacaagaaagactctgaataaaaaatccacacgtggaatcgtgaatgcttaaataatccaaggttgatggtggtaactcctatgctattcaaatgtggcagaaaataaaaaaaaaaaacatggaaagcatctcagctgattttacaaagttaaaataaccctgatagagagcagtatatggatactgggggttggaaattttaaaaaaatgaaaaaaagaacagtataagcccgtagatgtaaactatagaccaaatttacgtgtgatgtgtatacaaatatcctaaatagcaaaaggaggtcagcagaatattaaaagagcaatacactttgacgaaatatattttactctaggaattccagaatcgtttgctattaggacatatgttagtttaatacaaggggaaagtttagtaagtttccattttatttaataaaatggggtagctatataatcgtcttgagagattctggaaaagcacttagaatttgacttcaaatcttgtcatttcttgaaacgttttcatgcattgtgccttcaggttgtacagcgtggctgagtttaccactttttaatttctctggcaaatctttgctgattatagcttttcattcatcacgtcctttgtgaatccattcttgtttactctatgcggaataaatttttctcttctcttctagtccagtaattctccattctttcatttcaattggagttttcagtttctctcaattgctttccttttttgagagacagattaggcactggagatacaaagataaataagatagtactcagggttttttctctttatcctctgattcattttctacccttccatatttctctgtctcagagggagatgattcctacaaacttcattttgcagtgttccttgtcactgtctctggccaagtatggctagtaggaagcactagtgggagattgaaaggtgggaggaagggagaagtcagggtttttcccccttgttttctgctttgcacagtgtctctagggtggtcccagctccagccaaggactctgacactggcttgtggactctgataatagcccctcctttatccttccagcttcatgggtggtaggtagatggggtcccactgttgctaatctctgggttggctcaccatcccaactggctttttagtcctgccctaaaccttgtaattagttcccatattaaattcctgctattgaactgcttctcttgaattctatttttcttattaaactttgcacaatgtagataaaaaccctacttctgtgtgttcacaatctcataggaaaagcggacattaaaatgactataagtttagcctagtcagtgttccctcttcccttcttttggaagtagacttcactttgtgcatagcaattggccatgacccagaatgagccaatcaaaatttggacatgggcacacacagagaaaagatgatgtgaagacgcagggagaagatggccacctgccagccaaggagagaggcctgggacagagccttgcctcagggccctcagaaagaaccagctctgctgacaccttgatctcagagtcctagtctccagaactgtgaggaaatcaatttctatgtttaagctccccagtttgtggtactttgttccagtagttctgggaaagtagtgtactacctgtcctcccagccccacccaaccactaatctactttctgtctctatagatttccctattctggtcatttccgatgcatggaatcataatctgtggtcatttgtgactggcttctttcacttagcataaggtttccgagattcatccttgtagcatgtagctggatgtcactccttgtatgggcagataatattctagtgtatggataataccgcatgttatttacctgttcatcagatgatgggcatatgggttcttaccacctttgctgttatgaataatgttgctataaatgcccatgtacaagtttttatgtggatatatgttttcatttttttggttatagacccaggaggaatattcctgggtcatacggtaactctgtatttaataatttgaggagctgccagactgttttccaaagtggctgcatcactttacattcccaacagcagcgaatgaggtttctgattttttcacatccttaccaacatttgttattacctttttattctagccatcctagtgcatatgaagtggtgtctacattctacattgtggttttgatttatatttccctgatgactagtgatgttgagcatcttttcgtgtctttattggccaattgtatatagtctttagataagtgtatattcaaggcttttacccatttttgaattgggttgttttgttgttgttcttgagttgtaggagttctttatatattataaatattaaatatttatcagatatatataatttgcagatattttatttcttccattatgtgggttgtcttaattttcttttttttcctttttttgttgacgtaataattatacatatttatgaggtacagagtgataatttgatacatgtatgcaatgtgtaatgattgaatcagggtaattaggatatccatcatcacaaacatttatcattcctttgtgctgggaacatccaaaatctcttctagctttttgaacatgtacaataagttattggtaactatactcgccctacagttctatagaacactaaaacttattcttcttacatagctgtaaatttttatccattaacttttcccaagcctccccttctaattctgtgaccccattttctttttagcacccatgtctgagtgagaacatgtactgtttatctttttgtgctttacttatttcattaaatataatgtcctccaggttcatccatgttgctgggatgacaggatttcattcttctttaatggctgaatagtattctattgagtgtatatgccacattttctttatccattcatctgttgatgcacatttagatttattccctgtcttggctgttgtgaacagtgttgcaattaacatgagagtgcatatatttcttcagtatactgacttctttcctttggataaatacccagtagtagggttgctggatcatatggtagttctattttcagttttttgaaaaacctcagtattattttccataatggccattaccaatttgcatccctacccacagtgtataggagttcccctttctccaaatctttgccagcatccattatattttgtctttttgatagtagccattctaactggagtgagaggatatctcatagtggtcttgatttttatttctctgatgattagtgatggtgagcattttttcatacttgttggctattttatacttgcaaggctcccagaatagccaaaacaaacttgaaaaacaagaacaaagtgtaggatgactcacacttcccaatttaaaaatttatacactaacaagtaatcaagacagtgtggtactggcagaatgatagtgacatttgtatgtcttcctttgagaatgtttattcagatcttttgcccatataaaaaccagattatttgcttttttgctgttgagttgttttagtcacttgtgtgttctggatactagtcccttgatggatggatagtttgcaaatattttctcccattctacaggttgtcttttcattctgttgtttcctttgctgtgcaggagctttttagtttaataaagtgctatttttccatttttgtttttgttgcctgtgtttttgaggttttagccataagatctttgcctggaccaatgtcctgaagcgtttttccttatgttttctaccagtagttttatagttttgggtcttacattcaagtctttaattcagtctgagttgatttttctatatggtgagagataggggtctagttttattcttctgcatatcgatatccagttttcctagtatcatttattgaaggggtgtcattgtcaaaaatcagttgactataaatatgtggatttatttttgggttctttattctgttccattggtctatgtgtctgtttttctactagtaccatgctgttttggttactgttgctttgaagtcaggtagtatgatgcctccagctttgttctttttgcttaatattgccttggctattttggctttccatttcttgatggtgtcctttccagcacaaaggtttttcattttggtaggtacaatttaccctattttaccttagttggtcatgcttttggtgtcatgtctaagaattctttgtcaaacctaacgtctttaagatttacccgtatgtttccttctaagagttttacagtcgtaactcttacgtttaagtcatcaattcatttttgaattaatttttgcatatggtgtgatggagggtccaacttcattttttttttcatgtgactatctgattatcccagacctatttgttgaaaagaatggtcttgttgacctttttgaaaatcatttgggctggatgtggtggctgatgcctataatcgcagcactttagtgtgatggagggtccaacttcattttttttttcatgtgactatctgatcatcccagacctatttgttgaaaagaatggtcttgttgacttttttgaaaatcatctgggctggatgtggtggctcatgccagttatcccagcactttgggaggccacagtgggaggattgcttgagcccagaagttgaagaccagcctgggcaacatggtgagattctatctctacaaaaaagaaaaaaaaaaagaaaaaaatagaaaagcacttaccatagatgtttaggcttgtttctgtactctcaattatattccattgatatgtatgtatgtatgtgtcttttgccagtaccacacagtcttgattactgttgctgtgtcgtaacatttgcaattggcaagtgagtcatcctatattttgttcgtgtttttcaagtttgttttggctattctcaaggtcttgcaattccatgtgaattttagaataatcttttcaatttcaacagtgaagtcatctgggatttttttttttttttttttgagatggaattttgctcttgttgcccaggctggagtgcaatggcacgatcttggctcactgcaacctctgcctcctgggttcaagcgattctcctgcctcagcttcccgagtagctgggattataggcatgtgccaccacgcctgactaattttgtatttttagaagagatagggtttctccatgttggtcaggctgatctcgagctcccgacctcaggtaatctgcgtgcctcagcctcccaaagtgctgggattacaggcatgaaccgccacccccagcctcatctgggattttgataaggattttgttgaatttatagatcaatttggagagcattgccagtaataagtcttttgatccatgaacatgggatagtttttcatttatgtaaacctttaatttcttttaacagtgttttgtagcttctagagtataagttttgcacttacttgaataaatttatttttgagtgtttttattctttttgatgttattgtaaattgaattattttcttaatctcatttttgggttgttcactgcaagtgtatagaaatataatagatttttgtatattggttttctatcctgcagccttgctgaacttgtttatcagttatcatagtgtcttagtagttcccttaggattttctaaagatcgtatcgcctgtaaatagagatctgttcttttttttggaggagtttgtgaagaactgatgttaatttatatttataagtttgaaagaatttcacagtgaaatcttctgggcctgggattttctttgtggatagtttcttggttgtcaattcagtctcttcccttgttatagctcattcaaattgtctctttcttcttgagtaaattttggtagttgatgttgtcctaggaacctgtccatttcatctaagttttctaatttgttggcacacatttgttcgtagtattcttttctaatccctcattagtaatgtcccctcttttatttctgattctagtaatttgagtcttacctcctttttgtcagtctagttaaaaggtttgttaacttggttgatcttttcaaagaactagcttttggttttatttatttttttccatttttctccttttgatttcattattttttgccataatctttattattttcttctttctggttgctaggaatgatatagctacaagccaaggagcacttagggttactgagaaccactggaagctggaagagacaagggaggattctttcctagagccttcacagggagcatggccctgtactcaccttgattgcaggtgtttagcctccagaactgggagaaaatacatttaagttgtgttaagccactcaatttgtggtagtttgttactgtaccctgaggaaactaatacaaacattttaattattttatttatttttttactgtatttatgtgagttactttttagtatctagggtttaacatgtgtgtcttaacttaccagaatatacttcatatttataatttaattctagttagataccaaaatgttattcctatgtagttctattgtcttcttccctttttgtggtatttttgtattatgtctattaatattacaaacccaaccatattattgttgtaattattatttttaaattttttaaaattttatttttaagttccctgttatattactttactatctgtagtaatttctttagcctagtaacagctttgttccaactctcttttgtgcagttatttgcaaatatattacaagtatatttctatatatgttataggttcaacaataggctttatatataatattttatgcaattgctttttaaatcatttcagagaagaaaggaaaaaatatgcattgttagtgtcatagttacagaataacctttactgctatgcttcaattttctgtgagaattcagattaccctctggggtcacttgttttcagcctgaagaacttcctgtggtgtttcttctaaggcaacaaattctctacttttgtttctctgggatgtctttatttcaccttcatttcctgccccccagcccttttttttgtggtaagatacatataaaatttaccattttaatcattaaacattttttgaaaagttttgtgctctcatgagccttggtcctgcacatctttctcctcctcagcagcaatctcgtttcctgcttaattattttttggttttgctttttgtttttgtttttgttttttcgagacagaatcttgctctgtcgcccaggctggaattcagtggcgcgatctcgactcactgcaatctctgcctcctgggttcaagcaattctcgtgtctcagtctcaccagtagctgggattataagtatatgccaccatgcctggctaatttttgtatttttagcagagacagggttttgccatgttggccaggctggtctcaaactcctggtctcaagtgatcgcctgcctcggcctcccaaagtgctggcattataggtgtgagccaccgtgcctggcctcctgcttaatcatttttaaattttttttattttttattttttgagacggagttttgctcttattgcccaggctagagtgcggtggcgcaatctcagctcactgcaacctccgccttctggtttcaagcaattctgctgcctcagcctcccaagtagctgggattacaggtgcccgccaccacacccagctaatttttttgtatttttagtagagacggggtttcaccatgttaatcatttttaagtatactgttcagtagtataaagtatatttgtattgttgtaccaccctcaccaccatctgtctccagaactctttttatcttgcaaaactgaaattctgtacccattcaacaataactccacgttactccctccctcagcccttggcaaccactgttttactttctatctctgaatttgactaccctaggtatttcatacaagtgaagtaatatggtatttgtccttttgtggctggcttatttcacttagcatagtgttctcaaggtttagccatgttgtagcatgtgtcagaatttcattcctttttaatactgaataaattccattgtgtatacatataccacattttatttatttgtcgatggacccttgggttgcttctaccttttggctattgtgaataatgctgctatgaacatggatgtacaaataactcttcaagaccctggtttcaatccttttggatgtatatttttgaaagacagctttgtcgtatataggaatctttattttttttctttgagcacttcaaatatgttatcattcattgtttctgatgagaggtcaactgtttctattattgtggttcttttataagtgatgttcttttgtaagtgaggttctcttataagttttcctctagctgctttcaatattttctctgtttttgacttacagcatttttaccatggtgtatctgtttgtggttctttttgtatttatcctacttggaattcattgagtttcttgattgtataggttattgctttaaaacaaaaatctaggaagttactggccatcatttgaatattttttcttcctctttctcatctgcttccggtactctcagtatgcatatgttaatgtgattaatggtgtgccacattttgctgagattctgtttatttttcttcattcttttttctttttatttttcatttgaataatgtctattgaagtatatttgtctcactaaatttttcttctgccagttcaaatatagtgttgaaccttctctagtgaattttaaattttagttattctacctttcaactccggaatttccattgtattatattttataatttctatgcctttattgatattctctatttggagtaatattgttatgatactttcctttccttttttaatcacgcttttctttaattctgtggacatatttataatggttactccaaagtctttttctgttaaatctgataactgtttgctctcacttgcagtttcccttgtctacttcccccgtgataccccatcctatcataaccacagaaagtatggttcatacttccttgtttcttttcatgcttcatatatatatgtgtgtctgtatatatgtatatatgtgtatgtgtatatacacacacgcgcgcacacacacacacacacatatatatatgtatattttttttttttttgaggtggagtctcactttgttgcccaggctggagttcagtggcgtgatctcggctcactgcaacctctgcctcctgggttcaagtgattccctgcctcagcctcccgagtagctgggattacaggcatccaccaccatgcctggctaatttttgtatttttagtagagacggggttttgccatattggccaggctggtctcgaactcctgacctagggtgatctgcccgcctcagcatcccaaagtgctgggattacagacataagctaccatgtccggcctgtatatatatattttttggttggaaactggacttttcagatactgtattgtaggaactctgggtattggcttcccacttctggagcctcttgttcttatttgtttagtgactgcatagattattttaatgaagttgatttccccctgtcttggttcatttgtcttgctataaaggaatacctgaggctggataatttataaagaaaaaaggtttattgggctcatggttttgtaggctgtacaagaagcatggcatcactatctgcttctggcgagggcttcaggctgcttccactcattgcataaagggaaggggaaccagtgagatcacatggtgagagaggaagcgagagatgggggaaagtgccaggctgtttttaataaccagttgttgtgggaactaagagtaagaactcactcattcctgcaagaatggcaccaaaccattcaggagggatatgccacccccatgactcagacaccttccaataaggccccacctccagtactggggaacaaatttcaacatgagactcggtggggccaaacaaaccatatccaaaccattaacaccctaacagggttaaaccccttatgttgctcctcaaggaggtacagctttgggtgtgcttattgtcagcctcaaatgacagtgatattgatagggctctcttcctaaacagttagcaaatttaacagctgttgaactccactaattgttagctggttgctctatttaacaatgccatggagcataaaaattgctctaaatactaatacaattaaattctggctcctttaaatagtttctaaagtaagcgtttgatattcttttttttttttttcttttgagacggagtctcgctctgtcacccaaggctggagtgcagtggcacaatctcggctcactgcaacttccacctcccaggttcaagtgattctcctgcctcagcctcctcagtagctgggattacaggcatgcaccatgacacccggctaattttttatatttttggtagagacggggtttcaccatgttggccaggctggtctcgaactcctgaccgtgtgatccacctgccccggcctcccaaagtgctgggattacaggtgtgagccactgcgtcaggtctttcccccaattttttactaaaaaaatgtcaaacctacagaaaagttgaaagaataatacagtgaattcccatatacctttcatctagttgaccaaagtgctggaattacaggcatgagccaccacgactggccttatagatcttagtttggcatcaagtgtaagaattctttacctcgccttacatcccaaagattttctatttttcctttttttttttttttttgagttggagttttgctcttgttgcccaggctggagtgcaatggtgtgatcttggctcaccgcaacctctgccccccgggttcaagcgattctcatgcctcagcctcccaagtagctgggattacaggcatgtgccaccacgtccagctaattttgtatttttagtagagatggggcttctccatgttgatccggctggtctcaaactcctgaccttaggtgatccacctgccttggcctcccaaagtgctgggattacgagcgtgagccaccgtgcgtggcctttttctaaatgttttatagatgtatatcttatgtttagtccttgagtcattttgagttaatttttctgtagggtgtgaggttcaggttcatctttttgcctatagatgtgcaatgactctacaccctttaatgagagacatatcttcccccgttgaagtgttttaacacctttgtcagaaatcatttgggcatatttgtgtgtgcttctttcttagttctctatttggttgcattgatctatagctgtccctctgtcaatatcacagtcttgattactgtagctatgtaagtcttgaaactggatagactgattcttcccactttatttttctttttcaaatttgttttagctactctagttcctttgcatatttccgtatacatttttgtatgatcttgtctatatctatgtaaaatttttctgggattttggtagtaataatgttatcctgtgtaataatttggataaaattggcatctttactatattaagttttccaacctataagcatggtatatttcacgctatttaagtcttctttgatttcttttatcagcgttttgtagttttcagcacacaagtcctgcacattttgttagatttatatgtaagtatttcatttttttcaggcaattaaaaacagtatttattatgtttttaattttagtacccatgtgcttattgctagtacatagagatacaatttttttttttttaaatagagatgtggtctcattatgctgctcaggctggagcacagcagctattcacaggcacaatcattgtgcattacagcctcaaactactgacctaaaacaatcctcctttgtccagctcaattgatttttgtatgttcatcatatatcctgaatcctaaagacttactgaattcacttagtagttttagtgtttttaaaattaggttattttgctttttttttttgagacggagtctcgttctctcacccaggctggagtgcggtggctcaacactgcaacctctgcctccgggttcaagtgattctcctgcctcagcctcctgagtagctgagactacacatgcctggctaatttatatattttttagtagagatggggtttcaccatgttggtcaggctggtctcaaactcctgaccttgtgatctgcctgcctcggcctcccaaagtggtgggattacaggcatgagccactgcgcttggctgctttgcatttaagaaaagtcatgctttattttattttttttgagatggagtctcactctgtcaccaggctggaatgcagtggcacccagctcactgcaacctctgcctcccttgttcaagcaattctcgtgcctcagcctcccaagtagctgggtctacaggtgcacgccaccacatcctgctaatttttgtattattagtggagacgggatttcactatgttgaccattctggtctcaaactcccgacctcaagttttctgctcgcctcagcctcctaaaatgctgggattacaggtatgagccactgtgcctggccaaaatcatgtgtttttaaactgacagataaaattgtgtgtatttatcatgtacaacatgatgttttggagtaatatacgttgtgctaattaacgtatgcattacttcacatagttatcatttttgtggtgagaacgcttaacacccactcttttagtattttcaagaatacaatatattaagtatagttaccatgttgtgcaataggtatcttgaacttactcctcctaactgaaatttggtatcctttgaccagcgtgtctccactgcccccctacccctagttgctttacattttctatgagacaatcatgtcatctgcaaacaggaacagttttatttcttctttgccaatctgcaggtctttcatttccctttcttatcgttttgcacaagttagaacttcagggctatgttaaataagagcaatgagagtgaacatccttgctttgttcctgatcgtaggggaaagcatttagtttttcaccattaagtataggttagctgtaagcttttgtagtcttttgtaagctttatcaagtcaaggaatttcccctttattcttatttttcttattagagtatcatgaatggatattggattttggcaaatgcttttttctgcattgattgatgtgattatgtagttttcctctttagtacgttcatatagtgggttaccttgttttcaaatgttgaaccagacttgcgtttctggaataagtcccacttgatcatggtgtataattatttttatatattgcttctacttgctaatattttgttaaggagtttaaggagttttgtgtctatactcatgaaggatattggtctgcagtttatttttgtttttttttcctttttattttccccaccaccctgcctggctaatttttgtattttagtagagacagggttttaccatgttggccaggctagtctcaaactcctgacctcaggtgatccaccagcgtcagcctcccaaagtgctgagattacaggtgtgagccactgcacctggcccagttttctttttttatactgcccttgtccagtgcttcttttttttttttttctgactgttcctgcagagcagagctacccataggcagtgtgtcaagagtagctgtccttatacagttctagtatcagagtaacacccacttcataaaatgaactgggagatgttcccttctcttcagttttctcaaagatgctatgtagagttggtggtaattcttcattaaacatttggtagaattcttcagtgaaaccatctgggcccagatatttgcttcttgagagttaaaaacattttttaaatccttattcttcaaacaaagttctatttttctgaagatatttttcacagtacatacatctctttagctgcaaaataatttgtcgtttttatttgttaaggaagggtataattaccttatctaatatttataaaatattaagtttaatgtttctgttttaagagtgttaaaattacaaattcaattttctcagtagttatcaggctatcccaattatctatttcatattgggtgagttgtggtaatttgtgttttttcagtaattagtccatttcatctacattgtcaaatttataatgtgtagagttgtttctaattatgctttcattctaataactggtaatccgtgtcttctttcttttttgtttgttagccttgctagaggtttgtcaattttattaatctttcgaagaatcagtactttgtttcactgattttctttattgtgtttctgttttcaattttactgatttatttttatattttctttcttttgcttgctttgggtttattttgctcttcatcttctgtgttcttgagatgggagtggagactattgatttgaaactttttctcttttctaatgtaaacatttagtgttataaatttccctctcagcattgctttaactatgtcccacaaattttgatattcttttttttttttttttttttgaggcagtctctgtcgcccaggctggcgtgcagtggcacaatcttggctcactgcaacctctgctgcctgtgttcaagcgattctcctacctcagcctcccaagtagctgggaccacaggctcccgccactgcgcttggctactttttgtagttttttagttgagacggggtttcaccatcttggccaggctggtctcgaactcctgatcttgtgatccaccagcctcggcctcccaaagtgctgggatcacaggcgtgagccaccgcacccagccatattcatttttagtcagtttatttcccttaagaaatttttaaaaatacattaaacaataaaaatgaatatcagaaatgaatatctttgacccacggatgattttagaaatgtgctgtccagttttcaagtatttggaggcttttctcgttatcctccagttacctctttctagtttgattccagtagagcacactctgtatgacttctattctttgaaatgtgttaagtttttaaaaagcgttagatataatccacataccatatgtttcacccacttaaaacgtacaattcaatggccttttttatatttgtagagttgcgccaacatcaccacaatcaattttggaacattttcattatcccaaaaagaaatcctacactctttaactgtcaccttctccctccccatgcagctcttccactgtccatccaagccttcggcaatcactagtgagctttgttttatggcccagggtagggtctaaggatatgttcagtgaatacttgaaaagaatgtttattttgctattgttgggtagagtgttccgtaaatgtctattagatcctgttgttcagtggtgttaagttcttctcaactccatgctgatttttttgtctagttgttctatcagttgttaagagagggtgttgaatctccaagcagaatgattgatttgcctgcttttctttcaggatcttttcttgatccttttattcctgtctcttgaaattttcttttctctgaagtctattttatgttattaatatagccactcctttcttttgattaatgttttcatgatatattttattcttttaatttcaaccaacatatgttggtatatttaaagcaggtttcttttttgtttttcaactgaggtggagtctcactctgtcgttcaggctggagtggcgcaatcttggcccactgctacctctgctgcccgggttcaagcagttcttgtgtcgcagcctcctgagtagttgggactacaggcgtgtgccaccatgcctggctaatttttttgtatttttagtagagatggggtattaccatgttgtccaggctggtctggaactcctgacctcaggtgatccacccgccttggcctcccgaagtgctgggattacaagtgtgagtcactgcactcagcccaaagcaggtttcttatagctatgtttttaaattaactctgctatctctgtcttttaattgatataattagatcatttacatttatgtaattattgataagttagggcttaagtctaccattttatttatgtttttaaaaaatttagtttgtcctcctctttttttctctttttgtcttgtcttcctgtagagtatttgaatattttttagaattccatttcaatttatctaaattgtttttggttattatctctttgtatagtgttgttagtggttgctgtattacattatatgtatatatatatatacacacacatatacacacatatatttatatatacttacgtgtgtgtgtgtatgtaacttttcacagtgttgtcattttaccacttcaatgaggtatagaaacctatactttccccatttataattctctgcatacatttagtagaagcacttcagacagggttataatttttgcttcaaccatcaatataatttagaagtcttaagaggagatagaaattttattgtaattacatgtatttttgcttactatgttatttctttcttcttgatgtttctggattccttctttcatcattttttggtctgttgcatgatcttccttttgccattcctttaggggagatctgctggcaacatattctcttattttgctttatctgagactgtcttgatttcccattgattcttgaaggatatttttactgaatctagaattttgtgttgacacttcttttctttcagcacttgaaaaccattgtgtcatttccttctggcttccttaatttctgtaagaaatctgttacttgaattgtttttcccttatacatgaagtgttgtttcactcactgctttcaagacgttttctcttttcgtcttttcagaagtttgactatgatgtattttggtgtggattttattgggctttttatttggggttcagcatttcgaatctataggtttatgtctcttgccaaatttgggaagttttcagctattattttttgaatacgtttccagctgtgccatctttgtctctttcctggaccctgatgacaagtgttagatcttttattttagtctcagaggtctttgagactttctccctcactccttccctccctccttcccttccttccttcctttctctttttccatcattcctcctgctgctcctcttttttcttctttattttttggccagtctattttctttctgttcttcatattgggtaatttctattattttctgttgaagttcactgattattttgtctgccccctccattctatgttgtctttccattcaatttggttactgtatttttcaattctaaaatttccattaaaatatgtatctatttttttgagatggagttttgctcttgttgcccaggctggagtgcaatgtgcaatggcgggatctcggctcaccgcaacctccacctcctgagttcaagcgattctcctgcctcggcctcctgagtagctaggattacaggcatgtgccaccatgactggctaattttgtatttttagtagagacggggtttctccatgttggtcaggctggtctcaaactcctgacctcaggtgatccgcctgcctcagcctcccaaagtgcagggattacaggctgtgagccactgcacctggccaaaatatatatcttttatttctttgccaagatttttttttcatttgtttcaagcacgtttgtagttgtttgttgaggctttttttttttttttttttttttttgggacgaagtcttgctctgttgcccaggctggagtgcggtggtgcgatctcggctcactgctcctcttcccaggttcatgccattctcctgcctcaggctcccgagtagctgggactacaggtgcccaccaccatgccttgctatttttttttgtatttttagtagagacggggtttcaccgtgttagccaggatggtctcgatctcctgatcttgtgatccacctgcctcggcctcccaaagtgctggggttacaggcgtgagccaccgcgcccagcctgttgaggcttatgatatgtgctttaacatcctttcaggtagttctaatatctgtgctctcttagtgctagtgtctgtcaattgtcttttctctctttcagtttgggatcttcctgactcttggtataaatgatcctcaatgaaaacttcaacgatttgggtattacgttatcagactctagaccttatttaaacctgttttgaacaccattgtagtagaagaagggggacatcagcttgttacttctagatgggggtaaatatccaggctttccgctctgcttccattgacacccaatggggtgggggacccctgttgctgctgggtggttgtgggtattctggttccctacttggcctccctgatacctccctggctaggaggggtaggagtgcctactgcttgccacagtgctttcactgtcaccatgggggaagagggaggaaaggtggcctcattatctctgggaaaaggttaagtcactgaatctccactaggcctcctctgacatgaccccagcagggagggcctcatcactcctgggtgggagtggaagtccaggttcccctgacactgctggcgggtgagggatgggctccttactactgccatgcagggataaaagtcgcagtccttactcagccttggtgggggtgttgggtaccttggtacgtcctcacaagactggaagtctaggctccctgctcagttattgctggtaaatgggcagttactgtctaaatgtgttccatctcattagactgtctccttcctggtcctttggctagagagggcaggcttttcttggggcttttcaatctgtgccccttggtgttttgaagttgcctgctgcttcagctccaagtctgagataatgaagcaaaaagaagacccagtgaacccatcactgggttgttctgtgggcctcaaggcacctggatagtctgcctcctcttccccttccagaaccttcttatatttgttttatatctagtgttgagggtttttattaccacttactgggaagaacagggaaaagtatgtctgctctgtccctggagctcaagtccacaacttgcttttcgtttgtttttaaataattagttttgtttttaaatgaaactgagttttctttggagaggccaagcaagtttctttggagaggccaagcaagttgtctggtggagcgtctcatggtcagaagctgtccagttcttcccttgtgattagcttcaaacagttttggcgagaagctgtgtgggcgatgctgtgtagctcccacatcacaaggaggcacatagtgttgtggggcctggctgggggtcacaggaagcttgatcacatcttccttcctgtatctaataaattatctgtggtgtgaaactctgagatcatgtgagcatcctcttcccaagcagccttttactcagtggttttagcatgtctaggtgaatatattaaggtttacaaaatgataatttttctaattctctcatttcctttacatttattagctggtattcttccatgaagaagagctttatccaaagccacatccttttgttctctttttagtaccaatatgtattttaattcatgttttataattcattactgtcatgtttttcttgaaattgttccacgcggggcaaagtgagctccttctggttcactcttaggtccatttaacatgactctgttaatctttgggcagttccttgatttctgggcaacatgggatgtcccagactcaccattttcatttcatagtccacacctagaatcagctatttccccaaggagccctgcttccttttagtaaggaatggtatttagaaatgcaaataaatttccaagggagaagagttttctaagggaagataaagtattgaattatagtagttactcgtagtcacaactgctactgtattcttggtgacttaggccctcgtttgaagttagggaggtagagcttcatgtgacagtgatttgtgtgcctgtgtctcctctatctggctgactttcttgggagccaggagagtatcttttcaatttttatattcacagtatttagcactgtttctggaacagaggaggatttaataactatttggacttaaattgtgctaaacagactcctaagctgtgcatcatagaatccaagaatttttctaatgttctgcctgtgtggagaagagtaaggatcttctccacacagtggagaacatttctcacagtggaaatgttcataggccctgggcagattattcagtgtttcagaacttgtttctcttgctgaatgggaagcattttattggcttcagcatgctaaaaaaaaggctataacaagatctgaggctgttcttacgaggtagtggtaaagtatgggtatgggattcagtttgaacatttagagaaggtgactttgtaatctgtatatagctcaccctggaggtgaatggtactggttttcagcctctacttgggagatgtgtgtttcttcttttgctgactctgctactatatagttttatgacctttaagtcagtcagttgctcaatttcttttccttattttcatctggaaaagagcgtgatggtgttttgaattaagatataataagaaaaacatataaaacccttggatatgtagcaataaaatgaaagaagatgtattataagcacagaacttggccattatgagtagcaacaaaggaagcctagtgtcaggtcctagggtttgtttttatttgaaggagctgtatgtggcattttaataagggttccaaatgaaagggtagtttcaggctgagtctagctttgagactataatgataatgggactgtaaagttatattaaagtgggtttaggcagaaggcacatgaaaagtacatttatttataaccgcattttgagtgaagggatagaacctaaaaggaaagactaaaatattcaacatggtatttatcaagtaaagggtgtgctcacgcacatgcgtgcatgtgtgctgtgtgtgtttatgatgaataagaactcttttattccatcaccatttgtttaaacatgaagtttaaagaaatgctttatttcctgaattttctttttccaaaaagtaattcttgcttggggtaaaaattacaagcagtatagatatacaacttagtaaaacatctcaatattctgctgatagttttgtttctgttctttcagatgttttctgtgcacacactagatttttttttccagaaattagctcatactgactatcataagcccatcctgctgctgcttgagtttgttttcacgtaacacacagctttttatgtccatctgtggacatccatatcactctttttgatggttgaatgatgggtacataccctcatgtacccagtatcctattgagacatatggattatttcttgttttttgctattataaacaatgctgcagtaaataccattttgtgtgtgtatctgctgtctcatgtactttggattgatatctaagagtggaattactgaaacaaaagttgtggatatttatgttttgccagttgttctaaagagttggttaatttgcagggctgaggattcctcatctcagatgacataaggttcttgttatactctctaagtgccctgagtttctctctcacatatggtggctgtaatcagtgggcattacaggtgcctttgagatggtgtgacccttccagggacatctgtatcccacagaatgtctaagttggtacatcctagctctcagcacgttcctcctactgagcccagacttggcagggttggccaggtgtgtgcttatagtttgtggtttgagactgtggcagtttttcctgctttatctgagatgatgcttttctaccctgtttatcagtagtgttttttgggctgggggaggtcacaggtgaggtgatgcaaaataactcctactcttgttttcaactggaaactaatttatatcttattttgttgtatctggcttttcctccccctctgttaattggaagatatgcttatctttctcagtttatcgacttgagaaagaaatcttttggttatacctttctaaaaaaaaaaaaaaccattagcatagtaatattacttcacacttcctgtaccttaatctccagtttttgtgacgctttgagaattcttttttaaaaatttaagttttaatttttttagagacagtttcttgccgtgttgcctaggctgagtcttgaactctggtctcaagtgatccttccacctcagcctcctgagtagctgggattgcagatttgagccacagtgcctggcagagtttttgttattattatcaaattaatattatttttacattattaattttttctttctaggcttcttaaaattatatctaattttctatccatagttaacccagaccatgagatttaattctatttagatttaattctgtgcctaactggaactggtactactgctagttcattcattgataacattgaatactctgaactatgccctgttctatgtcctagggataaagaaatgaataaatagacagaaatccctgcccctctggagtttatgtactagagggggtggcaaacaatgtaataaatgagtaagtcttagaatacgttagaagagaacaagtgctaaattgtaagaataaaagtggaatagggtgagtgaggtccatggggtcaaggggagtatgtagaatttaaatagggtagtcagggagggccccattgagatgctgacatttgagcaatgacctagagtaggtaagggagttaactcactgcaggtggaggaggcggccagagccaagactcaaggagtcgccttcctgatgtacaggaggggcagtgaggaggccagggctgctagggtatgcaggagacacgtcacaaggatccggagggcacgtggggtggggggtgggaagggctttgtagaccagtgcgcactggagggctctgacttgggtgttgatgtggtcactctgctatgctgagagcagactccaggggacaagactgggaggagggaaaggtgctgactattgcaggaaagccgggcgagagatgttggtagatgggaccagactgatttgaagctatgaagttcccattaatgagcacattaagtacatttaactttcagtgggctggattaggactacatttttcttaaggattcttgagtatgagaatgcttgtgttctttcatgttgtaaatgcttgtgttctttcatgtctttcatggcttttgcagcctttaaataatgcgtgacattctaacttggtaaagatgtgttgggtcactttctctcccttctggctcagtaggcagcattcttttgtcttcagactccagtgttctggagaagactgcagatggtctgcctttttccgcattatgggtcacccacttctttctctgtgttggtagaatcaccagccttgctagatgtgtcttgtgctggttggactctactgatttttcttggcatatgctaaaccctttcaagctatagattcagttactcaatttcaggaaagttttccggtgttatatcttaaattttcttttcctgtgccatttgttttgttctgttcagaattagcagttgtgtgtctgttggatctttatctctcgtatctaacttttttttttgagatggagtctcactctgtcacccaggctggagtgcagtggcgtgatctcggctcactgcaagctccgtctcccaggttcatgccattctcctgcctcagtctcccgagtagttgggactacaggtgcctgccaccacgcctggctaattttttgtatttttagtagagatggggtttcaccgtgttagccaggatggtctcgatctcctgaccctgtggtccccccgcctcagcctctaacatctttttaatcacttttatggatttcctatattccatttccccaaatgaatgtccgctttcactgacttcttcagcaattccacttcacttcttacccttcttcacgtaatgttcatcagataatggtgttagtgcttttctccattggtgtccttgactcatccgttaccttccttcagtaaggagcagggcccacagggaaggatattccttgctttaacctctcactaagctgagataaatttgaatacggctcaagatctagagaaatgagtctttttttttttttttgagacagagtcttgctctgtcacccaggctggagtgcagtggcgtgatctcggctcactgcaagctccgcttcctgggttcacgccattctcctgcctcagcttcccaagtagctgggactacaggcacctgccaccacgcccggctaattttttgtatttttagtagagactgggtttcactgtgttagccagtatggtctcaatctcctgacctcgtgatctgtccgcctcggcctcccaaagtgctgggattacaggtgtgagccactgcgcccagccgagaagtgagtcttgattcttgtcatcttccctcgattttgttcagcaaattcctgtctcagaaatagcctttgtgtttgttgctcagggttgaggcccttctctactttcattataggttgaatttccttctctgttttgactttaatagaaggggagagtagatattttttcttttgtaagaattcccagggccaggcgcggtggctcacgcctgtaatcccagcactttggagcctgaggtgggtggattgcttgagcctaggagtttgacattagcctgggcaacatagtgagaccctgtatatacaaaaattagcatgatggcacgtgcctgtagtcccagctactcaggaggctgaggtgggaggattgcttgaacccaggaggtcgaggctgcagtcagctgagatcataccatggcattccagcctggatgacagagtgagaccctgtctcagaaaagaaaaaaaaaaattcccagacatatcgcttaaaaattatcttttgtgaaaaataatatattacagtatataaaattcaacatgtttaacggggaaggagggaaaagaagattatcttctgcccctgtcccttagctcccagttcccagccccaggaagcacaaccatatagaacacattcctagagtggaattgctttgtcaaaggatatatgcacttgtacatttgatagacgctgccagattgctttccatagaagccatcagtatatatatgctatcagcaaaaaatgagagtgccagtctcctcacattctcaccaacatgatgatgtttgaagtttttcaaatttttgccattctaataggtaaaatagatttgaaagttttattttgcatttcctgttaatacaggtggttgaggagccaggtgcggtggggcacacctgtagtcctggtactatcatttgagcccaggagtttgagcctaacctgggcaacatcgtgagaccctgtctctcaaaaaataaataagtaaaagtcagtctgagcatcttatgtgccgaagagccatttgtattctctgtgaactacctgttcattacctgtcacatttttattttgggttagtggtggtttttttgttgggtttatataggtactctttatgtgtaggaaaattaactctgtctggatatgagtcaagttttgttttcccagttcattcagctatgattatttagctgtgtttgtgctatgttttaggcatgtagaaagatttggtttgtatgtaggtgattttctcttttataacttcagggtttttatattataggcattccccatcctaagagtccgaggattctacggtgttttcttctgctaattatactattttcatttttttcttttctttctttatttttatttatttattaatttttttgagttgaagttttgctcttgttgcccaggctggagtgcaatatctcagctcaccgcaacctgtgcctcccagattaaagctattctcctgcctcagcctcccaagtagctgggattacaggcatgtgccaccatgcctggctaattttgtatttttagtagagatggggtttctccatgttgctcaggctggtctcgaactcccgacctcaggtgatctgcccaccttggcctcccaaagtgctgggattacaggtgtgagccaccgcccctggccaatttttttcttttaaatatttggtgctcctcaccaacatggcacatgtatacctatgtaataaacctgcatgttgtgcacacgtaccctagaacttaaaactataattaaaataaataaatatttggtgctccttcagttactcctggtgttaggagtaaggtagggtgcccaactgtgtttttcctgatgcctatcctgctgtctgaacaccatttgttggttcctttggaatactagatttatcgtatattaaattcctgtatatgtttgaacctaattcttggtctagtccatgtctgtttgtctattcatgtaccaatatcaaaccttttaaaatttaggcttaaaatattttttaaaatgcaaattcaataaaatcattttggagagaagtcttattggaatatttcagtagttccttcacagtaagatgttgtagatcattcttctgagcacaatctgctattcattgttagggcatgtgtttagttacctactttgaattgattttgctgaaagaagtaaggattcttgggtggtctttctatattctcctaccctggctccttggtaatgtggaaaatgaattttcaggtaaaattgtcagaggacagtaggatggtttttgttctggagtatattaacatgaactggcccaacttaggctcacatttgataacttcatgttagtaagcatcctcctttggttaaataaactggctgtggatattctccagggaaaaagttactagtaactcttagaaaactaatgcatacatgagctggtaaagaggaacttcttaaagcacaattttagagttatagaagcatatatttgttgttatgatcttgcaagtttgctaactgctttactgaaaatagcgtgcatggaaaaacatagcatagtaggtcccaaataagcacttggttctttctttctttctttctttttctttctttctttctttctttctttctttctttctttctttctttctttctttctttctttctttctttccttctttccttctttccttctttccttctttccttctttctttccttctccttcagacagagtcttgctttgttactcaggctggagtgcagtggtgcaatcttggcccactgcaacctctgcctcctgggttcaagcaattctcctgactcagcctcctgagtagctggggttacagggacctgccaccatgcctggataatttctgtatttttagtagagacaggtttcaccatgttggccaggctggtcttgaactcttgacctcaagtgatctgcctgcctcggcctcccagagtgctaggattacaggtgtgagccactgtgcccagctagcacttggttatttctttaaaaaatcaaatttaaattctgtcctgaatttgttatatgctttcttttaaaatgtatgtttaggtaaacatctgttttagggctttttcttcctttgaatttttttcctttatttgttcattcaacaaatattaattacttgctctgtgctagacagcgttttaggtactgatattcagcagacaaggatcttgcttttattgagtttataatctagtgggggagatcagcaataaataagttgtcaggatgtgattagttttatggagaaaatcaagtagggtggggtgaaagtgactcactttgggggcagcatccagtagcattagttaccttttattagaaaggcagcatgggaaaatagaagcatggacttcagagtttgatacgttcctgtacaaatctcagattttctacatgcaggttgtgtggccctgagcaaattacctaacctctctgacccccatttccccaactgtccaaaggggagagaagaatacctgactcatagtgggttattaaggattaaatgtgacaacttcaacaaaaaaaccctagaagaatgtttgacctgtaatagtcactttataaatagcagctaaaatattatcacttcatcactttattcattaaaagtttttaagaagtttctccattatttcattagtttcaatatcatgtgcctagtaagatggtaggttttaacaaaagcacccttaaatagccatttgtgccaaatgtcaccatagtgactgctaaaatgggggaaccgcaggtattactgtattcatttccatgaattgtcatagtttaatgttcatctacagttggtcatgttttgttgaggtcctaacagaaaaggaactacatttgtattgaacattgtattagaacaaattttaatacctctgaaaggtcatacatcaaagaatctagaccaaaaaccagagttctagctcagaaacaccagcactaccactgttttatctgtcccacattgaggaatatgacagactctggttcaaagataccttaacgccttatccatactactagaggcccaggctgagattctcctagaccacaggctgggagcagtgacatctccaagataccaagtctgtcagggtcactgatggagatttccatagaggaggttctcaggcctaactgaaggcatcacttcttagatacgtggcccaatcaaacactatccaaggaaggagcatggactctagagaggtttgggaacagggtagcagatatgccagaatgctgaaacctggaacaggccaggaagacaaaacagcagtctgcatgtagcaaaaagagaaggtaggaaggtacaggtaacaacaaaatggatttgaggtgagaatctcaatgtgaggtcacatctatattcctaacacacacagtttgttacctatgcgtttgccctagagacaggaccacactaaatagcacccattctttcttattttccttatccctcaaacaaagaagtgtccctctcttggccccaagtcaatgggtaagggattctgccaagacctttgtcaactatcccctatcatttatgttttttacctctccctgtctactgatttattctccctctacctcaaaacatgcttatatggttcctttctttaaaaaagaattccaccgaaatttcctactctgacctctaactcaatagttaaagttcctttcatggctcacttttcagggggaatctgactccacttcttttacctttcaattcctccttaattctgtgatcttcctctattcttgctaaagtcatgaccatctatgggtatgttcattgcctgttggacatttgaatgtctcaggcatttcaagttcagcattaattgaaccccctatccacttccacagtgtgatgatttttaaatatatccacaaattctttgacacttcttatttcaagaggtggagcttagttccctttctaactaatggaataaggcagaagtgagagtgttaggagtaggtccatagtgttaggagtaggagtaggaagaacactgtggcttcctccttgctctctctctcagatcactcatgctgagagaagccaactgccagatggggaggatgttccagcaatgctatagagaggctcacttggcaatgaattgagatctcctgccaacaaccagcactgccttgtcaggcaggtgagtgaactccttggaagtggaccctccggccccagttgagccttcagatgatgcaaccccagctgacatcttgattgcaacctcttgagaaactctgagccagaaccagccagctaagcctatcttagattcctggcccacagaaactgggagataagcctttgtgttttaagctgctaaatggttgtcagtgattggctacacaccagtatataaccaatacacacggcaaaccttccgtattcccagtcgtagggaaagcaaggaaacaactccttcctctccaagatacaactggtgatcaagtcctgttattttcatctaggtatctgttgattcagcctgttctgatttttctagtcactctgtcagtttattatttatcatctagactgtttcagttgcctcttaacaagtttcttgcctccagcttcactctcttttaatctattccccatactgccataaaaaatcattctaaaatgtgaatttgagcatctttcttctttgattgaattgtccccattgactagagttaatcaagcccagtcatcttaagcaatgcaggcaaagctgtttgaggtttcatcccaccatgctttccagctcctgtctctcctgcagcagggtgttcagccatcaaaaatagccggtgggtcccagaatctcccacggcttttcttctttctgtgatttggtgtgtgcagttctctctagttttggaaggctttcaccaactgtttgacgctttctctattttctgaaagttaggcattcctcctttcttctgcagtccccaggggatacctgtgtaattgctgtgatcacatcactgtcattgtttgtctctcaatgtctgtttttcagttagaccaagaatcccactagatgagggtcgatgctctgttcatctcttttttgttgttgttcttgcgtatctgatcttttaaaatgtttgatattctttttctttttttggggggggtggtgtcttgctctgtcatctgggctggagtacagtggtgcaatcatggctcactgcagccttgacctcctgggctcaagcaagcctcccacctcagcctccctaggagtgcacctccacagctggctaatttttgtattttctgtagagacagggtttcaccatgttacccaggctagtctcgaactcctgggcttgatattctttttttattttactgtggtaagaacacttaaccacatttgtggatctactacatttgttaatctacccttaacaaatttttaagtgtacaatacattattgttgactctaggtacagtgttgtacagctgatcttgagagcttattcatcttacttaactgcaacgttatgttcgttgattagtaactcctcgtttcccgccctgcagctccaggtaacctccattgtactctttgattctatgaatttgtctatttttggtatctcatataagtggagtcgtgcagtatttgtctttctatgactgccttatttcattagcaaaatgtcctcaagattcatccatgctgttgcatgttatagaatttccttttttttttttagaggctgaatagtactccatggtatgtatataccacatattgtctaccccttcatccactgatgggcatttagttgtttccacatcttggttttactctttgaggaacctgcatactcttttccacagcagctgctccattttacattctcataaacagtgcacaaaagttccagtttctctacatcctcaccaatacttgctgtcttttgattttttggtaatagtcatcctgacaatgtgcgttctgttcattttaagtctctagcaactaatgggatatttgaacagggtgtctgaaacttttagtctagcagatagggaatttcacattagcagagtcagaatataaaaatgtaactttacctctctatacatgatcataacttcactctctagccattgtttttcactaaaggcagtgaagagtctttggggatgagggttctggccccgtcactgatgctttcattggccatgaaggctttgctggttgttggtgccatccatttctctgtgttcccttttctctttatgttagtcccactgggccccctccgttctgactgtgagagttctccaggcttgcaggcttgtgctcagctgtttcagtgcctctctggagcatgcaccttgggaagtgctatgtgggtctcagacccaccctcctggtgcaggggcctgcttagggctgagcctctttaggaggactgcactctgggaagaaccaatgatgtgtctgggatttctgttagctagatctctcataaattccaagtcttagtttgggatggaaagaggtagaggatctggacttttcagagacttagtagcatctttaaaagaaaaatacttagttcttccagtggaaagctgtgggttccaagagatatctgctgtgcatttatgggcctattttagagcagaataccaaaatattcaccataattttaaaaataaatattaaataattaaaaaattggtacagcctgccaggagctcagtgtgcaatggtgacatccagcctgtgaggccacctggtgcggcttgggaacccgcagaagcctgcactgaagcccagcaaacccctcatcctagctaaccgcagcaaggactggcgtccggagaagggcgaggccgcttgtatcatggagtgtcagcttgctggaagccgaatgaattccgcgatgatatgtgcagaaaagagatccagggctttttcgattgtgcttcaagggattaggaagcctaaaaaatgagatcaatacaggagaccctgggagagtctgggagtttacctcccaataaatagagtaagttgtcatagaggtttcctaagacacctcacctaagcttaaaatggaaaagcattttcaatgatttctggactatagcttctgacaattatgcagaggcattttatagatgtttgcattgctgtgacctctttgaaggataagatgaggaaaaacactttttctaacctttggaatcaatagtatgggtagaagttatgttttatcttgaaataaaatcctctgaagagaaaaaaataattaaaaaattaattatacttgttttatatttataggagagatcttattgttggtgatctttgatagtatctatagcccaggacaaatttccagagcccttccatttctttccttattctgtttccattgaaatagaaagccgaaaccagaattagaggtcatcaggaatgatgatgagtgtttttgctctaactgatcaatctggatatgcattcagattaaatatggatgtagagattctagtgaaatttttttactgaaggccactttcagcattctttcagctgctgagttaacaagcatatcaaactaaaaaacagaaaggttggccgggtgcggtggctcatgcctgtaatcccagcactttgggaggccgaggcaggtggatcacgaggtcaggagatcaagaccatcctggctaacacggtgaaaccccatctctactaaaaatgcaaaaaagtagccgggcgtggtggcgggcgcctatagtcccagctactcgggaggctgaggcaggagaatggcgtgaacccgggaggcagagcttgcagtgagccaagatcacgccactgcactccagcctgggcaacagagtgagactccatctcaaaacaaacaaacaacaacaacaacagcaaaaaacaggaaggttaagtgttttttgtttgtttttgtttttgagacagggtctctctctgtcactcaggctgtggcgcagcatgaccacggctcactgcagtcttgatctcctgggctcaagcagtcctcctacttcagcttccagagtagctgggattacaagcatctgccaccatgcctggttaatttttttttttttttgtagagacagagttttgctatgttgctcaggctggtcttgagctcctggcctcaagcaatccacctgccttggcctcccaaagtgctgagattacagatgtgagccaccacacccagtccaagtgtttctatttagttgataatggtgagtagattcctaatccactctttgattgcatttgattctggaaaatgtttctttatatcattttgcagcatttcagtgtagtttttaaatatgccaatcatgtatcaaaaaatatatttctttaatttgtgaagaaaactgtcaactctcggggaagtcaaactcgtggagatttagctgcctacattgcagtttggtcatatcatcaaggtatcataacagcattaaaaaatcatggtattttggttaagattcaggctgttccagataatgattactgaaatatactacttgagtgaatcacctgagatcacagaaatggtctttatcagccttatcaaagtcatgaagaaacagttttttcctcattttaaatattcttcattttaaatatccttgcgagcacctttctccttagtatcacatgtatttcagtatggaaaagcagaccctgggactcactgtccatactgcatgttgaaaagcctgattgtccatgactgtagtgcgacttaaaatgtttatccagctgggtacagtggctcatgcttgtaatcccagcactttgggaggccaaggaaggaggatcacttgagtccaggagtttgagggaggatcacttgagcccagggtttgagaccagtctgggcaacatggtgagacccccatctctataaaaaatttaaaaattagctgggcatggtggtgcgtgcctgtagtcccagctactcaggaagtttaggtgggaggatcgctggggcctgggtgattgaggctacagtgagctgtgatcatgccaccgtactccagcctgggcaacaaagtgagaccgtgtatttaaaaaaaagtttattcattttttagcattgaatgaagattagattatttagattagcggtccccaacctttttggcaccagggactggttttgtgggagaatttttccgtgaactggggtggggggattgttttggaatgattcagccacattacatttattgttcactttatttcttttttttttttttttttttttgagacagagtatcgctctgtcgcccaggctggagtgcagtggcgtgatctcggcttacctcaagctctgcctcccaggttcacaccattctcctgcctcagcctctcgagtagctgggactacaggtgcccaccaccacacccggctaatttttttttgaatttttagtagacggggtttcaccgttttagccaggatggtctcgatctcctgacctcgtgatccgcctgccttggcctcccgaagtgctgggattacaggtgtgagccaccacgcctggcctattgtgcctttatttctattattattacattgtaatatagaatgaaataatgatacaactcactgtaatatagaatcaatgggagccctgaggttgttttcctgcaactagatgttcccatctcagggtgatggaagacagtgacagatcttccggcattagagtctcataaagagcggaaaacctacatcccttgcatgctcagttcacaatagggttcatggtcctatgagaatctaatgacatcactgatctgacgggaggtgaagcccaggtggtaatgctcgcttgcctattgctcacctcctgctgtgtggcccggttcctaacaggctatgaactgggggttggggacccctgatttagatcatcaactctgctctgaggaaaacagcagtgttgtagactggcatgaagtgcaacttcttctactctatgtagcaaccccttttctttctggtcctccttcactttagatccctgagacccttttccacattgtaccttggtcgttgtatatgaacatcaaacatgaaaggtgctagtgagatcccatctctatagaaaatttaaaaaattagctgggcatggtgggcctgtagtcccagctacttgggaggctaaggcaggaggatcccttgagcccaggagtttcaggttgcagtgagctctgatcgtgccactgcactccagcctgtgtgacagagcaagggcctgtctctaaaaacaaaacaaaacaaagcaaaacaaacatgagaagtgctgattcataccttgcaaagaggtttcattcggcagcaagttgaaattatctactggtttgtacatgagctagcacttcctcttccacatggcatgccattgatgttccttgatgtttagtgttatttgatagaggaatttgctaacaccttgttctcttttctctttgatgaaaatgtttatcattaactttggggctcttctaaagaatgttccattagtatgtgtttgtacctttttttttggcctctgaagagtgcagctttcaatgacgcctctatagttgtggtcttttccttttggtaatgaagtgcatcagttttgcactgagaaatgttattttgcccttgaggaataacttggttggtttactaaagagaccatcaaactttgaaagtgacatggaaagcttatgcggtttctacaactatttcagaagcttcataaatgctaaagcgtctgggctgggctcagtggctcatgtctgtaatcccaatgctttgggaagctgaggcaggaggtttgtttgaggccaggagttctagaccagcccgggtaacacagtgagactccgactctacaaaaaataaaaaaatttaaaaagaaacccacaaaaacaaaaaaacaatagaggactctgactttaggagcaaatgaatccagtgtctgataaattccaattttttaattattcaccattgtgctttctatgtgtacttcccttctttaactgcctgggtggtacatctcttgacatataggatatgtgtctttctggcttgcagtttagttccagtcaatagtgagcctcctaattgttcagagttgtatttatgccactcaccatgtgacttttatacttcatcaaatcattttgctctgtcaatccttctgaactgatgtgatggtacaaaatagaaaaagatggaaactgctaattttaacagatataaacataaacacgtacataaacaccagtgcatacatattacgaaaatatattgtgtaaaagcagtaacttgtaggactaagattaactactgtgttagtagtgcaagtatacatttcaaacttaatgattatataaagaatgaaacaggatatcagtgaccataatacctttaacatttcaaatttgtgaaatatatgtgaacaaaattgtttcatttatttctttgtttctttttgagacagagtctcactctgccacccaggctggagagcagtggcgcgatctcggctcactgcaacctccatctcccaggttcaagcaattctcctgcctcagcctcctgagtagctgggattacaggtgcccgccaccacgcccggctaatttttgtatttttagtagagacagtgtttcaccatgttggccagactggcctggaactcctgacctcaagtgacccactcacctcggcctcccaaagtgctgggattacaggtatgagccaccatacttggcccatttgtttcttttgaaataggaattcccagtgtagcttttgttgaacttccatgggcctctacatgtcctccatctgcaggttgtatgtacattgggctgtagccatttggtggcaaggaccatggtagaggccagtctgagagtgcacctggtagatccttaaagatgcaacctttgggaaccttgaacctttgattgctataaacaagtaaatcccctagttgatcatcactcaggaatcttggctaagcaaggcctatgaggaaattgatttcttgacagatacatttggaaggtctttaagttattctccttaccaatcacataaattttttaatgttttctataacttactgacttcagtcccatttttctttcatttattcaacaaatatgtattaagggcttgctgtgtgctaggcactctgaaagacaagacagcatttttgccctcttggaactaatgctttgtatatattattttctcctgtatcatatccagtttacactttgctacttacttttctatttttcctttttcttacctattatgtttcagatccataaactattttgtctatgtctttatttcaaattattttgtggccgggcacggtggctcacgtctgtaatcccagcagtttgggaggccgaggcgggtggattaggagatcaagaccatcctggctagcacggtgaaaccccgtctctgctaaaaaaatacaaaaaattagccaggcatggcggtgggcacctgtagtcccagctactcgagaggctgaggcaggagaatggcgtgaacctgggaggcagagcttgaggtaagccgagatcacgccactgcactccagcctgggtgacagagcaagactctgtcgtcaaaaaaaaaaaaaaaaaaattttgttctccagtctaaacataccgtaacagtcgtagcattaacctttgtgcattaaaacgcttaacatttccatccaaaaaatttcaggtatttttattttaaaattaaacaggttctccctctttcatccaggctgaagtgcagtggtgtgatcacggctcaccacagccttgaactcctgtgctcacgtgatcctcccacctcagcctcccaagtagttgggactacaggcatgtgccactgtgcctggctaatttttaaaaactttttttagagatggggccttgctatgatgcccaggctagtttcaaactcctgagctcaagtgatcctcctgcctcagcttcccaaagtgcttccccactggcatgagccaccataccaggtcaaaatttcacgtataacacaagaaatacattttttttttttttgagatgtagtctcaatctgtcacccaggctggagtgcactggtgggatctcggctcactgcaacctctgccacctgggttcaagtgagtctcctgcctcagcctcccgagtagcaaggattacaggtgcacgctaccatctcggctaatttttgtatttttagtggagacagggtttcgtcatgttggccaggctggtctcgaactcctgacctcaagtgatctgcccaccacagcctcctaaagtgctggaattacaggcataagccaccgtgcccagccaagaaacgcattcttataaaaagccaaatatatagatatagagtaaatatgaagtcactccttataattcccatcccaactgcctctcaagagccatgaaagagactattttctatatttttgctaatagtcttatctcttcttaaaatgttagtctgcaagatgggtttaaaaatacctcattgctttagctcatattggttgctattagatgggttaagcatcttttcttatgtttagcagtcatttggatttttgtgaattgccttttcatatcctttgccttttttctgttggactgtttgtttcttcttgagttaattttggtattctatgttttcctagaaaatgatctgctttgcctagtttacaaatccttatatgtaattacgttctctttcttgttcctaatttgggtaccttccttttttctttcttgattagatttgccagaggttctatcttgttagtcctttcaaagcatcagcttttcattttattaatcttcaaggtcatttaaaaaatgttttctgtttaattaattgccgtttttatctttattcattcttcatcctgctttctgtggactcagagaagacccgttcatgtagaggaaggtgggaacaaaggttcaaagatagttgtcgagggtcaggaaaacaattgttggcatcattctccttcacctcctcactcccaactgccatcacaaacacaggcagttcagaatccatcaagaaatgagtcaggaatcaggcagactgaatcagactatcagctttgttaataaggctgaagtagagagtagtgcttgacctaagatcacagtcaggctagtaacccttccctctgagttaaacttagccaacagaataaggcatttagaataaacgctttgagaggtttgaaaagaagacagttggaaatgaataaaacaatcacttagaggtgctgagggccaaatggcctcagggcagttcggtttttcagttctgtttggagacctagatcaggaacaaagaaaaatgagttggcagtctctggctggtggctgagtaagcagggccagagttggcagaaggaggtgatcttggggtttcagactagtcagtgaggcaagtgagaccagcagggcatggaaaaaaccacgaagagacaggagtcggggcttcagcttcttgtgagcatgcaaacccagctcggagggagtgtgatgctgggacagccaaaagaggagcagctgggggccagagaagggcattgcacatccagaaccctgatggcaggagagtcagagaacgggcacaccaccaagtgtgatgaaacttgtgggggattgacgatgagtcattcttcagactctctgggactcttgttctttccccaaattagtttaacatctgctttggaatcaaaagggtaactgcttttctctttctggctaattaaacaaatgcaaatgtatgcatagccttattgtatcctcacacagcctgggagggaagcacagtgtgggtggcaggtacatgacgctagaagcagagggtgtttagtgctggggtgggaggacagcaggaggatctgtcccagcgccagacgtcttccatccctacgggacctctcaaggtcatgctacatgaccttcggcatatgaattcacctggcaccacagtattgttcttaaaactgaaaatgtaccagcgtattgtaacttgtaagcccacaaacttcttgtttctagccatgtacttacagaaagcccttgcctttatgttttcacagggagggcatgatgaaccttgtcttatagctcatgagaaggccaacttcactaaccactccttgccgggtgtggtatgtttccctctgtaattacttctccctgtgtactttcttatggtaaaatgtcatgcttcagaacaaaattaaaaagtcatctaaagagatggtttggttatcatggaagtcaagttcctcttagtagaaatgagcagttatagtcagactttatagatactagaaagaagagcaatgtatttctaaactacatgcttgtgtcaaatttcagattttgtttaacaatttgtatattaatcatgatctaacccacctgttttggaagaaccctctcaaactgggtttttcctctgctctcacaccacaacaacagtcatcaacacggaaaaagacttctgtgaccaaatgtatgggggtttctctatagaagtagtggacaccagctaggtgttctccagttcaactctgacgctgtctacctggagagagcatcagatcccacagggcaaaactcaggccccaaggctgcctccttctccagtcaccagtctcaagtctgggcctctggaacttctgaccaactggcttcaagttggggttcccatgactcctctgggttcaactaatttgctggagcagctcacaaaactcagggcaacactaacttacattgatcagtttattataaaggatatcgcaaaggatacagatgaagagaagtgtaggacaaaggatggggaagggcatagagcttccacgccttccctgggtgcactaccctccagaaacttccaggtgttcagctgtccagacgctctctgaactgtgaccttttgggtttttatggaggcttcattgcataggcaccacaaccatgtagaaatgtgattggacaaaaagtacatgatctaaacctagcatgcctgtctcttcaagacttttcttggtctctctgtgtaacattccttcctttagggtatagttaggactctctctagtttgagggactcctgacccataattagagaagggtcctgtcttgggcacgtgaaaggacaggagaagttcagagagagagagagattctgtttcctgaggcctaaagtgccctgaaattataagaaggactataggcatcaggagccaggaaccggttctaatgcccatagtccttgttataatttgttatctatatctatctatctatatgtatatctatatctgtatctatatctatctatcagtcaatcataacaacataccatcagataaacaatttctatccatacccattttctgataataaaaactggatctgttgctggctaggtgaaactcggaaactcatgaagctttttaccttttttacaaatgggagtgtgccctttcatcctgaatcattagagtctcctaggtacccctctctgaggactcttattctaacagcctttgcaaaaattagccaaacatctgtttgaaactcactcagagtcattttcatctttgcctttctcctagttatttttagggttgataaatttgttttccaagagcaaacagagcatttttaagctttgatttttggctagcatttaggaattcttgttctgtgcagagctggctggatgcccacttaggaacttagcctgcacggagattccttcagtggaagagcattggtctggagtcatccatccggctcctggagcttggctaccctgatacttcccggtctccctgcaaatgaacacctcagcatgccattatagttggtcatcttactctgtttttacagaatccaggaggagagttcctgcaaaggatgtcttgggcagggtttaattatttctacgaataagaaagctttcctcaggtggaattgtatttactttctgcaatataagccatgaatttacaaatagagtctgatactgtcaggatacataattgttgttatgcttaagtagttttttttttcttgagatagagttttgcccaggctggaatgcagtggcacagtcactgctcactgtaccttcaacctcctgggctcaagcagttctcccatctcagcctcccaagtagctgggtctataggtgccataccaccacacctggctaatcaaattttttttttttttttttttggtagagataagggcttttatgttgcccaggcgggtcttgaactcttggatgcaagtaatcttcccgccttggcctgccaaagtgctgagattctaggtgtgagccactatgcccagccttaaatagattttaaaaaattacaaaactgttacatgttcatagtagacagtgtagaaaaatgtaaaaagcataaagaaaattaaaatttcctatcattccaccacctagataaccattctttcttttttcttttttttggagatgtagattccaatgatgtcatctcactgaaacctccgcctcccaggttcaagtgatcctcctgcctcagcctcccaagtagctgggactacaggtgcacaccaccacgcccagctgatttttgtatttagtagagacaggatttcaccatgttagccagactggtcttgaactcctgacctaaggtgatccatgcgcctcggcctcccaaagtgctgggatttcaggcgtgaactaccacgcccaacctaaccattcttaatatatagatttttttttcagtctttttatatgcctaaatgtaaatatgagctcctactgcatacactttacaatttgtattttccaccaaaatatattgtcgtcattgttccatatcactggatattttgtagtatcactttctctattgagatgccataaattcacatatatttacatttatataaatgtttacatatttataatatttttaacatttatagtatatatcatatttctatagagataacatgtattcacttatattcactgccataaaattcatacttttaaaagtgaacaatatggtgatttgtttgtatcttcacaaagttatacaatagttggcactgtcaaattctagaacattacccccccgccccgaaaacccagggcagttaccacccttccatcgctccttccctcatcctgtggcagccactcaagtactttctgtttgtgtgaattcccctcttctggacattgcgtagaagtggaattatacaatagatggtcttctgtgtgtggcttctcttttttttttgagacaggttcttgctctgtcacccaggctggagtgcagtgctgcaatctcagctcactgcaacctctgccatcctcccacctcagcctcccaagtagctgggaccacagatgtacaccaccacccctggtttgtatttttggtagagacaggatttcgccatgttggcccaggctggtttcaaacttctgggctcaagtgacctgcctgcttcagcctcccaaagtgctgggattataggtatgagctaccatgcccagcctgtgtggctccttttgttcaacataaggttttcagggttcatccatgtatcggtacattattcctttttactgatggataatatttcactgtgtggatgtacactttatatttatccattcaacagctgatggccactgggttttttctactttatggctactgtgattagtgctattgtgaacatttgtctgcaggttcttgtttgaacttctgttttcaattcttttggatatataccaaggactggagttactgggtcataatggtaactgggtgtaactttttgagggactccccaaactgtttttcacagtggctgtactttttcacatttacgtaggcaatgtatgagggttccagtgtcaccacatcctcaccagcacttgttaatgtctgttcttttggctagagccatcccagtcgatgtggagtggcatctcccagtggctttggtttgcataatgcctaatgattgatttttctaatgtggagcttcttttcacgtgcttgttggccacttgtattgtatagtctatttggagaaatacctgttcagatcctttacccacttttcagttgggttatttgtctttttattattgagttttcagagatctttacacattctagatactagacacttatcatatataggatttgcaaatgatttctcccattctgtgggttatcttttcattttcttttttttaacttattttaggttcaggggtacatgtgaaggtttatcacataggtaaactcatgtcacaggggtttgttatacagattatttcatcacccaggaagtaagcccagtacccaacagttaccttttctgctccctcctccaagcctccaccctcaagtgtctgttgtttcctcctttgtgtttatgagttctcatcatttagctctcgctaataagtgagaacatgcagtattcggttttctgttcctgcattagctggaggctgaggataatgacctccagctccatccatgtccctataaaggacgtgatcttgttcttttttatggctgcatgtcctttcattttcttgatagtatcttttgaagcaaaaggtttttaatttttatgaagtccactttatctagtttgtctttgcttacttctgcttttgatgtcatctctaagaaaatactgtctaatatagtcatgaagttttacagctatattttcttccaagaattacaaagttttagctcttgtactttgaggtgatttttgtgtatagtatgaggtaggagtctaactttgttcttttatatgtggatatccagttattccagcataatttgttgaaaagactgtctcccattgaattgtcctagcatccttgttgaaaatcaactgcccataaatttatgggttcatttctggactgtcaattctattccattggtctatatgactgtcttacatggacatgggatgtctgtttatttacttgacttctttagttttttcaatgacattttgtagttttcagtgtgtagactttccacttactcatacatattgataaatattttataattaacatttataaatattttatagttaaacataaatattttattctttttgatactactataaatgtaattggtttctgagtatatttggattattcactgcaagtatatagcaatacaattgatttttgtaagatcttgtattctgcagccttcctgaactcctttattagccctaagaggtttttttgttgtaaattccttatgattttatacatataagagcatgtcatctgtgattagagatagttttactttcttaccaatctggatgcattttctttctttttcttgcctaattgtccagactaaaacctctggtataatgttgacaagaagtggtgagagcagagagacacccttgtctagtttctgatcttaggagaaagctatcagattttcacgtaaagtacaatgttagtttgtgagtgttttgaacttgccctttatcaagttgaggaagttcccttttatgtctagttgttcagtgtttatattatgaaaatctgttggattttgtctactgctttttctgcatctatcgagatgatcatgtggttttgtcctttattctattactagggcaaattatactgattgattttgaccaactttgaatttctgggagaaattccatttggtcatggtatataatcctttatatatgtttttaggtttggtttgctagtattttgttgaggatttttctatatcttatctatatattttatctatatgacatctattatcacttttaatggctgcataaggcttaattatgtggatataccataatctaaccaattagactttaaattatttcttttcttgccattgttgttgttataatcaaggataagctcatcactgttgctcagatagctttgtattcattcatgattatttttgtaggatacattcctacaaatggaataatggaaccaaaggttatgcacagatgtttgtctcatcttgtcattgacattttcaagttgtttatagtggggtttttttttcagaggtttttaattttcaggtaagtcacatctgttttttctttatgtattctgcctttgcctataggctcagagaggcctctcctaccttattcaggataatctcctatattttctttcttttttctcttttaatttttcaagacaaaatttcactacgttgcccaggttgacgtgtggtctttcttctttttcagttttttgagacagggtctcactgtgttgcccaggctggagttcggtggctatttgcaagcacaatcatagtgcgctacagccttgatctcccgggctcaagcaatcctccctcctcagcctcccaagtagctgagactacaagctcacaccaactactgtgctcagctaaaacaatccattctttatcctagattagtcatgccatctttgtcataatctgaattcttatttctgggctttgccatgatccagtgctcatctttctattcctgaaccatgccattgtaattttttatttttctgatctattttactatctggtagtacaagtggtttgtgtttgtgtgtgtttgtgtgtgtgtgtgtgtgtaattttctcctttagagaagaatcaagttacttgatagcttctgtagagaataatcaattattctaccagatgaatttcaggacaattttataaataattttcttcatatttctaatctgattagaatttttattggaattacaacacatttataaaattgtttgcagagaatgaatatccgttgggagagcatggtatgcttttcatccagtcttcttttttgtcattcagtaaagcatgaatttggggggcgactgtaactttcttaccaggtttatttatagatgctattgtaagtaggattttttttaacgtgataacttatttaggtatattattttattatacagttgaatacatacttattttagaaaatttagaagctacaatgtgaatttaaaaagtaaatgacactcagtctgagagataagcactgttaacattttgtgtgtatctttctattaatagatttacagtctaatgagggaagtaagacatgatcacatgaaaggcttaataatctgagacactattgagtgactagcttgtactttttttctgcctagccttttttctccttttggaaactgcttttcccataactagtggagctgccaatcatccaggtccctctccacggccaatgggttggacagtgtatcacctcaggctcttttctgggagagactctctaatctggaatctcaaatgctaaagacctctagtcttgcagtgctgctgggcaaggccttcctatcctcagagcacctgtgtttgaatgataccagcttaggagagtgaagctacgaggtgattcaaaaccattcctgatgacatcattggacctcatggtctagagctggcttaaagccagcctgaattcatcctagactttcctaaatcagtaaagccaacaaactcaccattttgcttaagcaaaattgagttaggtgtctgtcatttgcagagtcccaaccactaccacctcctgtgtctgtgccatggtgccacatggggagtcacccagatgagttaggaccctgtatgccccttgccccccaggagagtgggtgttcctcagtaagagcaggttcagtgcattgtgcctgttgtctccttcaaggcaaagctggatggccatgagaggcagcagccttggccaggtggggcatggggctgccgtgccaggccaggccggctctgaactccttactgcactctgtccattagaatgacagagtctgagtatggaggttagaattatagtgaacatgggggattctatgtcacagaggctctgcaaacccatgccacctgctatataagagctctctgccatgcaagagcagactggctgccttccacacctattatccagtaaaatagcaattaaaatgcagcttgtggcaatgactaagcttagcccaggcccgctgatagagttcttggtgcctgtggatataacacatgttgcttgtttaccttcacaacatttcttcggtgtttttttctgggcagtgtatttggtccctgttgcagtagatcccattgtcactggggcttactctaggccatccgtagtagcagggaacgtggaccccaggctttgtgaggatgcccatatcattttggagctccctgaattcaaaattaagtatgaaaagatttatttagaacgaaaaaaaattgcaacaaattattggagcctaggagtttccgatgcctacctttgagatccctttagttggctcaccagaagcccctgctgtgatatgcttcctggttgtagcccgacttccccttcccacctagaactcacagtgttcacagggtcatggcaaggtggtggggcgtggctgaagcttcagggtaaatccatttgtgaagagcagactgagtttttgtttttgtttttaaatctgtttgatatctcagggagcagtcagcagctagccagcctacatcttgaaacccttacattttggagaggtacaaattaagcattgaggaccaagtaggatggaaatatgattttgcactttgtgcatgtatgcatgtaagaaagagaagagagagagagattgtgagaggcaggagagagacggggagaggccatcagaacttggggagagcagagcccgcctgcttcctgagtgaagcattgctcaagcgctctctgcccggccccctccgagtgtggttttcctcccaggccagcaccaaacccagaatagagtggctgacttgctgattgaggtcggcagctcccgagaagcaggagaagcagagtttttgcagtaagtacatcgttggttattatttaagacagagatggaaaatcttaggatagctggggaagaggtgcttctgctttaggtacaatgtcttacagacccagtggatcttggtgtgactaaggcagtgtgaatacattctcccgtggtgcatggactggataagttaatgccacatgcatgattttggggggctgaaaaaggatttgaaacccaccttttgacgtgttgaaagaaaatgatcttttctcacttgttttatcttgcaaggaaaggatgattaatgccaacttcaagttaatatatgaagttctttagaaaagaagccctgtgggtactaattagtagcagcgtggagattattttcccatccagggtgaatagggctgcttctgtgcattccttttgccaagtgtgggatgtctaaggtcctgtggagagaaccgcccactcgactagtgcttagcccctggaacgttctcgagtcatctccccttggaggagatcagcactgtagtgtgccctgtcgtctggcagagggtctgataatgtcgcaatgctcaacatctgggcaatacatacattgtgttagggtctgaaatgagatgtttgtgaagcccagatggcagagtttcaagcaataatatgataaagttggtggcttttctgggaagttatttattatatggttacttgagattgtttttcccccacatcccatcacagggctgaagataccttaaaatctctcttacccactctattttctagaaattaagtttttgctttttatttccttgtcccactgactctaatttcctataggtataaaatgtttagctcagcggtgcagaaggtccacactaagttttcttgggaaatgtggcttccaccccttctcgatagaatgctaaggtgctgctctagctgcagaactcactggtgtggctgcttctgctcctttacagctcagctccatggactctgtgtctctgtggttctgttttagagtagccgtgtttcacttcctttaacctttcctttaccaagtgagttaacatggaagcctgtctaaacagaggagcccccaaggcaggagagggggtgcaaaataagcaatactaaactttcatttgaaaacctggaatttgaaataaaccaccacctgtgaagtatcattcctcattccaattttatttttccaatatgttattttttttttagacagagccttgctgttgtcacccaggctggagtgcagtgtcttgatctcggcttactgcaacctctgcctcccaggttcaagtgattctcctgtcatagcctcccgagtagctgagactacaggcgcatgccatcacacccagctaatttttgtatttttagtaaagacaacatttcagcatgttgtccaggctggcctcaaactcctgaccttaggcgatccacctgccttggcctcccaaagtgctgggattataggcgtgagcccccacacctggccccaatacattaacatttttttaaatgatctaagtaattttgagctctcactgtacaacatcatctcatttgattctcccagcagccccatgaggtagctacctttttggtcttcacttaatagctgaggatgtggaggcctagagaggtcagagagatgggtgggcaggtaggtgagtggtgcagccaggatgggaactcaagtctgtctcaatccagagctcatgctctgatacggcatttcagtaaattcagaaattggagaaaatagtgacttaatcccacactttaaagcaactgttaaaatttctggattttttgctgggtgcagtggcttgcacctgaaatcccagctactcaggaggagaagaaggaggattgcttgagaccaggagttcgagaacagcctgggaaacatagcaaggccactgtctccaaaattttgtaaaaaaatttagccaggtctgggcgtcgtaggtcatgcctctaatcccagcattttgggaggctgaaacaggtagatcgcttgagctcaggagttcaagaccagcctgggcagcatagtgatacctcatctttacaaaaaaatcaaaacacaagctaagtgtggcgatgtgcacctgtagcaccagctactcaggaggctgatgtaagaagatcgcttgaaatcaggaggttgaggctacagtgagctgtgatcatgccactacatttcaccttgggcaacatagcaagaccctgtctcaaaaaactaaaaattaaaataagtaaataaataattagccaggtgtggtgttgcatgcctgcagtcccagctactccagaggatcactcgtacctaggaattcaaggttacaatgaactatgatctcactactgcatttcattctgagtgacagagtatgaccctgttctaaaaaaattatatatttctttctacctgtacaactagatattatagcataaggctttaaaattgttacatagtttcacaattattactatattattcttttgagacagagtctcactctgtcgcctaggctggagtgcagtagcgtgatctcagctcactgtgacttctgcctcccagcctcaaactatcctcccacctcagcctcccaggtagctgggattacaggcgtgtgccaacatgcccagctaagttttgtatttttggtagagatggagtttcactatggttcccaggctggtcttgaactcctgagctgaagtgatctgcctgccttggcctcctaaagtgctgggattacagggatgagccactgcacccagcctggtttgacaaatatttaatggcataaaatattttcttaagtgattggtccataagttatttaactattccctgttttttaaaattaggttgcttttccttttttgtgttttgctattataagtaatagattagtaaccgtctttgtccatggaactttccttatgtttttgggttgtatctgtagggtagattttcagatgtgggattactgggtaaaagggcatgaccattttaatggtgcttggtgtgtgttgctaaattactttatatcaacacagtgtgggggagcacttgtttaatttcatccattccaccagctgacagtatcatggggaaaaaagagtaagaaaaacagaaccagccgacagtatcacagggaaaaaagagtaagaaaaacagaacctctttatggtattttgcatttcttttaatacagctaggctgaacattttttacatgcttgtttacaagttgtactttctcttttgatcattttatgggatcgtaatgctggctttttggggccaatttatatgggtaagatttatttgccatatttttgtcagttattttccccagtctattgtttacctctttaaaatttttaaaaaacatgcagtcatttaacatttttatgtagtcaaattggtttcatttttttcgtaagtcttctatgttagagatctaagttctctgcttttaaggcatttatgttcttctagtattttctttcatggatgatgtgaaagtaaatttaaactggctttaaaaaatgctaaccagtttttccaatatcatttatgagcaactcttatgttttctaatattttatgattttctctttttatacctccagcttttctattatatgatttttctggattatttgattatttataggagcaatctgtttctacgccattatcgcactgtgatagcttttgtggcttttttttgtttgtttgttttgtttttttgtttttgagatggagttttgctctgtggcccaggctgaagtgcagtggtacaatctcgtctcaccacaacctctgcctcccaggttcaagcgattctcctgcctcagcctctcgagtagttgggattataggcacccgccaccacgcctggctaagttttgtatttttagtagaggtggggttttgcaatgttggccaggctggtctcggactcctgacctcaggtgatgcacctgttttggcctcccaaagtgctggggttacaagcgtgagccaccgcacctagcctgttgcttttatgatatgtagagagaatgagttgtgtggagtaatactgaggcaacataagattctggttaagcccataggcactggaggcagattgctcagccttaacttctctgtccctcagtcttattatctgtaaaatggggataaaattaataatagtttctattccatagggttgttggagtgaggaaacaaaagctaaattaaaacacacacacacactgaaaaagtatttgatgtaggtagatgtgtagagaaagtatttgaagcatatatagatgactctatatacatgagtatggattatattacatatatacataaaaagacatatgtatttttatagagtcaaacatgtcattctttccctctatggcttaagacaacctttcatgtaatcttgggagacaggaaaggttgtcttagccacagagggaaagaatgacacgtttgagttgcatatgcaaaaaacttggtacattgaaagacaagcgtgtggctgagagaaatacatgcagcacacataccacaaagagtactactcataataaatgatcccagcaatcaactagaaaaaacagacaccaaagaaaaatgggcaaaggttataaaaaagcaattcctagaaaaaggaatatagaaggccaataaacatgcaatgttcaacctcaataatagtcatagaaatgcaaattcaaatactcatgacgtgtcatttcccatgcaacacattggcaaaaatggaaaatatgaataatgttccagcatagagagaatcataggaagatgggaactggcaatcataaccaatgggaacaaaaattagtaaagcttttttgtatggcaaatttataaaatctatcaaaaggtaaaatatgcatacctttgatttgtcttagaaaaacactgtacatgtttttaagtaagcataaacaatacaaacatatttatgttaaaaattgtatgttaaaaatataagctatatatttttatttgtatgtatataaaaattcatttaataaaaagcactggatgtgtgatatcaaactgttgtttcctgtgtcacctctggagagagaagtagactaagggccaggttgctttttcctcttgctagatatacttctgtgtttgaatatttcatgagtctgaatttgtgcatttgtataaagtaaataaacaggcatttttccgggcccacaggcaagaagattcttgggagcaggatgctagctgtagaagctcaaggttgggaaagtgagtgacagattttgggaagaacaagaatttggtggcagtatttaaagatgcttaaaggtcttaacttatgttttagaaaaggaagcaacccaagaggcatggaggaaaagttgctttattgatgggcgccgacctcttccatctcctgtgcctgttttcaggctttgtgcagttgcgtccccacacacggctcgtagacgcccccgaggcactgtgctcctcactttcttttccaacatgtgttccttatctctggtttattgatttattatttatgtatgtatttttagagacagggtctcttctgtcacccaggctggagtgcagtgatgagattatagctcactgcagcctcaacctcctgtgctcaagagatcttcccacttcagcctcctgagtagctgggactacaggtgtgcaccaccgtgcctggctaatttatttatttgtaggtatagaggcttactacaggctgttcttgaacttgtgggttcaagtgatcctcccaccttggcctctcaaagtgctgggattacaagcgtgaaccactgtgcctggcctctctagtttaaaagattgtcatctgaggttcaaaataagcccttcatccattatccacccagcagacatccagcacccagtctgagctggcagtgtgctaggccctagggagacaagggtgagcaaaagagaacgtgccagcctccagggacctacgcatgggttggggaggagggacagtaaacactgatgaattatatcactgtgatggtggctgcgaagctgccattgggggctgtggtggagagtcacagagggagggatcctttccctgggtgggcaggaggcgcaaggaaactagggtcctctgaggagagcctgcatcgctgcagtctctcccattccatccctttctccgcacccctaccgccatgtcttcattcctttcactgggaccactgtttcccagattttagttctttaatgcctcttttcacagttgttgccattgtcaactaccattacttattacagttcctaaaactgacttaacattattaatgtatcttgaaaggacttaaccgcaagtgagaaacaatgaaaatgaaatgatgctaaatttaaaagttaggatgataggtaatgaaggcagaactcttgaatgtggtctagaaggcatgcatggggttgctctgatcacaaagggatgctatttatatgggagaaagggaatgtattaggattagatatttagctggcagggggactctcttgtcagtgaactcagggaggacactgtaggaaagagatgacagaaagagggagagactgcagagcatttatttattttgtttaattacaagcgtgagataagccagcaacacattacaacccgggggatcagagggtccctctgagacagactgcgggagccacatctggttgctacagtaacgggcctccttataacgagaagagccacaagtgcccgacataaatggcttggggcagaggagcaacaagcggcctaccttgctgcctcttggggaaggcagtctcggggaggtttcgcagtgggtaaagaatgagactctcgtggggagggtctcgggttgtcttgagtctaggagcttgagggcctctccgggtcttactgatgaggtcgaacatagggaaaggaagtcctcctggcttcacctgtgctgcctgcgagcccttactgcatgggaggagccccaggacaagaaggcggtacagcagcttttttgaactggcttgggatgctgagagatttgggcatcccttggccatcctgaggagggccaggcccacatgatgggatcagtgcaggggggggtggtcactggggccctcctgtggtccttcttgccggcgtcacccctgtagctgcaggaacttgaaacccctgccccaaacttgcattctccttcctgccccagtatgcctcctccttgctttgctgttccctgtgcctgtgagtttctctccctcttgtcatctagttcatgcttcttatcctggaagggtcaccaaagggtcttttccttcctgctgggtcatgtgccccttgaataagctcttctgtcactgtgtgactttttagtagcattttcccaattgatatctggtattttcaaggccatttgatagttccctacactggatggtgagccccaggtggggaggggtggtgtttggttttgtccatcctgtgtcctggtgcctactgcagtgcctagatacaggaggtgcttccagaatgattcttgagcaaacaaatgaatgagacagtccccagctgtttgtgtaaacgagtgaattcccacgactcgttttgggcctggttttttttcccagtgcagcagagcacagggaatgaaggggagaggagggcctggggagcggggatgtggggtgtgcgtgtgaaccatgggaggaagcctgcgttttattccaagggacacagggaccgactggagggctttgagcagaggagtgatgggatctgacctacattgctaaaggatcattgtggttagtgtggaaagattagccaggtggagggagagggctgaggagaggatggaggtgaattagaggggtggtggcatctggaagattgggctggactgggatctgtccggaatgtagagcccacgggtgcagcgttctgggcgtcaggatcccgtgatgtgtttgttgctctgatccgtgctgtaacttttcacaggtgagctatgctggggccctgagtttcccacattacaacacacacacaacttttcaatcaacaaacctttgctgcccccaaagccaccccaggagcccctggggcccatgtgtgccagttgaggccacggtggccccacctgcagctggctggccgttcagactcctgctgctgctcccgctgcctccttccatcacagatgatactgagttgttaccagtcaagacagggaaaaggcaccctcaaagcctcagctcttcaacctgccgttctgggcctccgccatccaccgccactcttgttttccagtgccattttgcacaacttccaccgtgctcgcgcgctgtggccaaacagcactactccttgcctgcttttgggggtgctcctcttctcacctggaatgccctctcctccagttttcacatgtcaacctcctacccatccttcagagttgtattagtctgcttggtcgctcacaacaaagtaacacagactgtaggtcttaaacaaaagacattaattttctcacagtactggaagcagacattggagtcaaaatcaaggtgttattttgggaggttgaggcaggagaattgcttcatcccaggagtttgagaccagcctgggcaacacagtgagaccccatttctcaaaaaagaaaaaaattagccaggcgtggtggtgcgcaccttgtcccagctactgaagaggctgaggtgggagggttgcttgagtgttgagtttgaggcttcagtgaggtatgatcatgccactgctctccagccttggcaacagagcaagaccctgtctcaaactatatgtgtgtatatatatatatattcaccttgtatcttcacatggttatccctctgtgtgtgcctgtgtcctaatcttttcttatatggacatcagtcatactggattagggctcaaccatatgacctcattgcaccttaattaccacttgaaagaccctctctccaaatacagttacattctgagacattaggggttagggcttcaacataggaagggagtggcggggagggacacagttcagcccatgactagagtctcagtgagatgccactttcccctccagcacccactgtgctcacacaccatagcctgttagtgggcttctttctagcactggttgctgtgtcctttggtgttcgttcgttcgttcgttcgttcgttcgttcgttcgttcgttcgttcattcatccatctaaaaatagtactaagagacatctagtccagactcctggactgtattattctttgagtcctgaccacaccaactatatctgacacaggtcacctgggacatttaattttttgttaattcatcaaacaaaatttctgaacacttctcatatgtaaggcattgatccagatgctaggcagcaggcacagcagaaggggtctgaatgccagccagctgctggtggggccactgatttgcctttccttttaaatgcaaaggcgaatcagagttggcacttccagttagttggagagacataactggcatatacagtcatacaagagaggacatagacaaaatgcttggaatttagagcaacaccaaatcacatttgtctttgtaggtgtggggagatggcagataagactacaagggtgaactgacatttgatctgggacttaaagatgggtaagatttgtgtagataggtggccttttgagtttaggcttttttcacttagcatagtgcatttgaaatacatcctttttgtgtgtgtgctattcattcacttttattgctgagttcattctttctattgctgagtactagtctaatgtggggatgcatcagtttatgtatccactcactgttgagggagagttaggttgcttgacttttgctgttacgaaatcaagctgccatgaacattagtgttacagatgtttgtgtgaatacaaattttatttctcttggataaatactgaagagtgggattaatggattgtatatgtttaatttttaagaaacttcagcactgcaaagtggctgtaccattttgcatttccgccagcaatgtattagagttccagttgctccatatccttgccagcacttgatactgttttgttttgtttttaaatttttagccattctagtaggtgtgtagtgatagctcttatggtttcaatttgcattttcttaatgactaatgatgtcaagcattttttcatgtgcttatttgccatccaaatatcttgtgtggtgaagtttttatttaaatatttggtcattttttattgccttgtgcagtttattattattatttgttattaatatggacatcatttgttatttttaacaaaaataacaaagaggctgggcactgtgactcacgcctgtaatcccagcactttgggaggcgaggcgggcagatcacctgaggtcaggagtttgagaccaacctgaccaacatggtgaaaccctgtctctactaaaaatataaaaattagtcgggcacagtggagggcacttgtaattccagctactcgggaggctgaggcaggagaattgcttgaacctgggaggcagaggttgcagtgagccgagactgtgccgttgccattgcactccagcctgggcgacaaggggaagactccgtctcaataaataaaaaataaaagtaacaaataataacaaaaatggttattattcaagaattcaagattcaagtcctttatcagttttgtgttttgcagatatttcccttccagttgatggcttgtcttttcattttgttgacaatgtcttttgaagaccataagttttaaattttgacagtatcccattaatcaggtgggtttttttgtttttttatcttagttattttattgctcatatttttggtgttgtaactaagaaatctttgccttactcgaggtcacaacagttttctcctgttttcttctagaggttttctagtttcaggtttcacctttaggtcaatgggctgtctttaatgtggaccagacactgggcccacaggtgtggaaccacagaggaatgagacagagcccttcactcagggaccatctgggcaagggaggtgggggtgggagtcacacagggaaacagtctttgtctggtgtaaggcctgctgataagcctgggtccagggtgctgtggacacactgtggtgtggaagcaggtctgtgcccagacaaggggctgtgaactgaggtttaccagacagtagagggtaagtgaaaagcaggagttcaggctgggaagcctgttctgggcttagagtggccttgggcaggcctggaggctggatgatagaactcagcatccctgcagctgctggtcatttgctgtgcctggggtcaaagtgcaagacagctggcaggagtgggcagaagggagcaggggcctgagcacttggtgtgccttatcctccaacaaagaggaggtggaggtggcttcatggcatggctcaggctgtgctctttgagggtcgggggtaactgtccctctttattttgaaagtcagatgtgtctgtgtcataaagggcacatccatagggggcagcggaagtgctgttacataaccgtttctgtccctcacgctggaaacagatcgcacagcagttgctgtacttgctgttccttgtagacttactcctgtgcaaggaacgtgtaatgacaaggtaatcccaggagcagcctgcaaaattatccgtcgtatttgtggttcctgtgtatatttaaaacacaatgctagaagcgattgatgctgacgaaggatagggcatattccaggcactgaataaattaaccctgcaaagcacagcagttgctttcattagccagctggcactgcaggaatattgctaaagcctgtgggttagaaaagaaaatctcaggaatgcgagaacaaaaaagaaatcagccacattcagtgatttaacttaatctggcaacaataaggaaatccagaactcacggtgctctgagcaatggcggactcccgctgcatgtgcgagtggatggatattccctgttcagtggaggggatatccaccacgactctgggtacccacggcgggatgcagatgtgagttagggccatgcggcgatgatccaggttttgttcctgcatcctctgcaactagagaagctccagcaaagttctgtgttcccctcttttcttcctgatgtccccaaggagtgaagcaaatgaataggcctagctaatgtgccatctctctctcccttctctacctggccaggcactttctgggatggctgctgccatcatgtccatgacactgaaggcctctgctgcctgcagtcccactgctgcctccgccaccctgggcaccactgctgccttgttgccctgtggctgtgaggtgccatagtgccaagtcttcagcacgccccagaagccatgatgagtatggtggaggcctcagaattttcctggggaagtagctctttccatgttgccttgatggccctgttcccacctcctgtctctccccctaggccaagtgttatcccaggagacccttcacttccacagacagacagacagactgccagggaccctcctcagccagcctcttcacatgccgaggccacagcactcagtgtggttgggtccagttgagaccctgctgctcatgacttaaggcttctgtgcattgaattaagccactaggggacttatgagatcaccctctggcttctcttgttgggtcccatacagccagtatgtgtcaccaggggcatgtggcatgtgtagcctgcctctcctgagtttgcagagctgggctggctcctccttgattttatcttcctctggaccagagtggctgaagtatagtgagcagagggaggggcagtggacgtggtgaggggccagacctctccatccatgggtgggggctctcgttatggagggtcccttttttgcgtctgtgctcagcagtgcgggggaagagggtttgtccccttcctcccaggtcctcatcgttcaaatgcacggaagcatgttggtagagcacacagaggttttgctgggtgggtggggcagcatgccctgcagttcttgcattgtttccagaggaaatagaatagaatgcaacagaactggcctgcctgttgcctgggaagctgttctcctgacatcacagggctgtgcccatatccccgcttggcttaggggcccctaagttaggaacaaagaagcagaaaaggttggataaaagataaggtactcagacttgatactttaaattatcaagttcctaagtctatggttaccatcagttcatactttacaaagcatttattaacataaattcatttattatgtttctgtgaagatgcctggttaaatctgaaaccatagaaatgtaaagtattgtttactatttctgtgaaactagggtgtaaaccaaaagttttaaaagccatccctcaggaataaatttaggaattatttctcaagcatgactgtgagttaagaatattaagttttataacactgatgcttacacatcagcatgaatgttttcaaggtagtagtgctggaaggctctatattcacatccatggggctctcatcctgaaagcagtctggggactttattattttttttcaaccatttagagatatttataagtattatgggagaaggattgtcattgccttccagttctcttttgtgcttgcccgttaattcagcacctatttagtgagtggctcctgcctgctgggactgtgtacctttgtagaagctccctggctggtggggcagggccagggaggcacccatatgcatgttttcagtgaaagccagaatctaagtattcattaactaatatttgttgaacacttattatgtgccaggaacacaatggtgaacaagggaggtaaaggccctgctatcacggaccttccctagtagcacaggaaggcagataacccatgacagaaaatcaatggcagataatcgatggcagtgagagtcttcatttggtgataaaggctctgaagaaataaaccaggggctgtttggtggggtgggagagctactctagagagtataagaaagacgcctcctagaggaagcaccttggagcagagactgacctaggagaaaggagcccactgtgtgaggagctggggggacattctggacagagggaacagcagggtcagagctcttccttgggaactagctgcacatgctcagggagctgggagcggcccacatgaagcacagtgagcaggggagagtgatcagagctaggcgaggaggtgggcagggccaggaagcctaggagcttggggctgggacaaagaccttgggctttcactcccaatgcagtgagaagccactggggggttctgtgtagggagtgatgtgatctgatttttgtgtacgtgtcttaattttgaaactttaattttagtgaaaaaaagtcacataacatgaaatttaccatcttaaccatttttaagtggacagttcatgatttgtgttttgaaaagactcctgtggctgctgaatgggcattaagtggtaggcaagaaggggcaagagcagaagccaagagccagtgaggggaggctgcagcacccgggtgagaggcagggctggcccaaggggtgggcagtggtcacagacctaggagttccagaagagagacgattttctggaggtttagagctgggagtatctcatcagaaaggtttttgcaagaaagtcttgattggcataagcctaaaaggaggggataaaacattcatacagggaggccctcagattggtgaataccccaagatgagaaccgcaagtttcattggaagtgcagagaagagtcctgtttggctacgctgcagggtaaggggtcagcgtggctcagccgagctcaggcaagccgtcatttaatttggtggatgctattgtctgaatgttgatgtaccccccaaaatttatctgttggaacctaaaaccccatgtgataggattaagaggtggggcctttgggaagtcggccatgagggcttcaccctcatgaatgggattgtgcttgtgcaaaacaggcttgaggagctcccttgccccttctgccatgtgaggcgcagcaagaaggcaccttctgtgcggcagagtgagccctcaccagacactgaatctgctggtgccttgccttggacttcccagcctccaaaactgtaagcaatgagtttgccttgtttataaattacccagtctacagttttttgttgtaggaacccaaatggactcagacggtgtgtaaggggagcagtaggccagggttaggcacacagcctgaagtggcattgctgagggtcccgttgggggagttagcaaactcctcgacattcccttgttgctgaactataaaatggggatgacagcagctacctcacagggtagtcagaaacatgaaagaagacgaaggaaaatgatgaacatggtgccagtctcttagttggtgttgctaaatgttagcttaaaaatacagtaaaatgggctgagtgcagtggctcatgccagtaatcccagcattttgggaggcttgacgcgggaggatcacttgagcccatgagtttgagaccagcctaggcaacaaggtgagatttcgcctctatataaaaaaaaaaaaattagccaggcgtggtgacacatctgttgtcccagctacttgggaggctgaggcaggaggatcccttaagcccagggggtcgaggctgtagtgaattgtgattatgccacagcactccagcttgggcaatggagtaagaccccatctctaaaaaaataaatgagtaaataagataaaatgcaggattttgagcagaaaatgactgaccccagctgaattttcagaaatctgtcttgaatatgtggaacggatgagcccaggagggccttaatgccaatctgtgctggagaaaaaggcagggctcctacaggaaatgttgcaggcatctgatctgctggcctggacagccgtgaatttgagaaatgggcgccctagagaggagtccaagatgactgaggttttgagtctggaagagcaagagaaaggctgtgccgatgacagaaatagggaagtccgggctgaagctggttattcagggtttgttctgtgccccaggctgaggctggctgtacacaggcagatgccaggaggctgcccctgggaagggcttaccaacaaggagaggcatacgtatgagaccgtctcagactaggagaagattttctggagcggagagacttgagcacactttggaaggtggtgttgaagttagccgggccatgggagctgggcaggtttcctgggcctcctgtttgccacaccacatctctgtcttcttcctccagctctgcaccagcgcaggcgaccgtagacactgtacctgtgtcccatgccttccctgagcctgtgggcagcactggctgtcaggttggagggagggagaggatgcgtatgaggtgtttcctagctctggggtgctgcactttccgttttgcttctccctttcattacaagccctgcccacacctttgtaaacacttcctttctcagctcacctcagttccccagctggcgtcccaggcagaggcagttgcatgtgcaaaggcccggagccaggacttgataaatatggctcaagatgctgcagcctagatagatatgaaagtctctggttccctcctatactgtagtttttattctgtttactttgcactagaccattttacactattccaaaaaaaaaaaaaaagggctcttattttatttccatctccttttcctactgccttggctcattcactttaatcctttgatggaagccatgttacaggtaagggaataactacttattagtggtcatttagctctttgggatgctggttgcttgaggcagctttggagacagaaggacgtcacagaccagtgattgtgagctcttggtctcaatatagctgccagattatagcctctctcttgggtctgcatttcatatttgggacttgcctcggcctctgtttcttattccagattacaccctattccttatgggtctccatattataccctattccttatgggtctccagattacaccctattctttatgggtcttcaccttctggcaggagtccatagtttcttactccactatcaaagtttgttttcaggtttgaggtggtgtggttagcgatgtacaaatgttcttttccatttagtttttgtttttatcacttctttttttccagtgacttctgctgatgggatcaatgaattttactttggaatttttcttctgatgctgtatggaaatctgttcttttccttatttactgggaaagaatctgaggctattgggatgatttttcatctcaagactgtgggaaataatcagctttgaagcatttcctgtggccatttgctgaagtctgggattccgtcagctgcgccccaaccagattttcagtgttaatgtttccatgttaggtggtgaggctaagcagatatgtcatgtgccggctggtctaggagccagtgtcccagggctctcattcttcctctggaagtctctccaccgtggcactgctgacattgtaggccagatgcttccttgttgtagggctcccctttgggttaccgatgtctagcagcatctctgggctctgtccagtagcaccccaagttgtgacaccgtaaatgcctctgcacattgccacgtgcccattgggcttagaactactactgtagaagaggtcaggagcaaattcgacccatgttccaaaaagctccagctcagtattttcaacatgtggttcacttacgttctatttcctgctgagtcccctggcaattgagctatgtgcacattcttattttgttggttctcagacttgaatggtttggcctcttccgcttcccagtgcttattgtgcttgtagccgagccctgagtgccctctcccactcctggagactcgtcattattttctgattgtccagaatggtttcccagttgcctttctatttcttgccttaaaaggataatgaagctgaggcccgagataacctctccaacgcaggctccgaaggcagcaatttagtggcggaacagcgtgttttcagggagcaggagacgtgtggactctgactttaactgttgcccagcgcctaattgtattccttaaataggggttccctctctcctccttttctccctccctcctttctcttctactttacactgtgaaatttaagagttgcagtttaagtcctacactattctggagaggagagaaacttggtaagaaaataaaatgtttgacaaatttaaagaaaacacccctggaacgacatcccccaccccaccatgggtgtggggtcctagatttaactgtaattccttgatcgatgtgatcctttgtggtgttcatgaggattttaggaaatcatgagattaataatagaaaccttcttttcactgtcttgtacttggctggagcctgtttattttgtatggctaattcatatccataagaaaacgattactcagctagcattcccacctgtgtttatctttcagcagccaggatttgttaagccctgggcaattttaattgctgtgaagtgtcttccctgcaggtgtgtttccctcgcttctttctctctttcacatttccaagtgaaaatagtcttctctgtgtagaagagtgtgttccttggatctgatatgtctgtctgcctcctgccctgaacacacatttaattgacccatcactgtgtgctgctgagtcagaaggcagagcagcgctccgttgaacaccatcaacagtttttgtcgagagggcggctcatagttgtcaacagccttctgtgtgcctggcacctgatggacttgttctcctttcatctttacagttttatgaagttggcactgataactccatcttattgggtgaagatgtagagaatcatgttcagaaagcatggctgagttcacaatgtcaacagtggagctgaatttggaccaggtgcatttgatctatagccttggtgctctccagggagcaaagattattcagagaggccatccgtccctggtgtttaggtgtgtaggttttggaaccaatttaaactggatctgaatcttggctccaagataaactctgagatttgggcaagttgcttaacctcccttggggaaatgaagtttccccacctgtgaaatggatatgtcttagtctgttcaggctgctgtaagagaaataccataaactgggtgacttataagcaacagaaatttattgctcacagttctggaggctgcatagtctaagatcaaggtgccactagatttggtatctggcaagggcctgctgtctggttcatagatggagtcctcttgcagtgccctcacttggtggaaggggcaaacaagctccctcaggcactaattacattgatgagggctctgcctcccagatgccctacctcctaataccacaatgggggttaggttccaacatgtacattctgggagaacattcagatcatagcaggaggtgacccttacctcgtagggttactgagctatttacatagagcatttagcagtgctttgccaggctcagaatgaaataggatagctgctctcagctcatgacagcatttatgtaaatgaactggcttcagagagccaggctgaggggctgagatgacgggagggatgtagaagtggtgggaagtggattgggaggaaacctgaagaaacttggagtgggcctaggggtgcacctgctccccttctagtaggagtccttcctgcaagtggacggagggcaccatattgtgggttttttgtttttgtttttgtttttgttttttgttttttttttttttggagatggagtctccctctgtcacccaggctggagtgcagtagctcaatcttggttcactacaacctctgcctcccgggttcaagtgattttcatgcctcatctccccaagtagctggggctacaggtgtgtgtcaccacgtccccctaattttttgtatttttagtgagacagggtctcaccatgttgcccaggctggtctcgaactcctgagcacaggcagtccatccaccttggcctcctaaagtgctgggattacaggtgtgagccactcccagcctatattgtatattttaaatttgagaagaagatgggatttgaggagcagtgtatggctgatgggtgggtacaaaatggaaggccttgcccaggaaaacaatgatgggaatgaagccgaagatgctcaggaaagggagtgtgggcagcaggagggggatggatgaggagcattttctgggtgcagtcatgtgggagtagttgggttgaattcagagggtccaagagaaagggaccctgatgcaacaaacatgggcctggacagtgctgcctcagagcgggccacctgccaaccctggaaaggaggctgcgtgttcgtcaggggcaccatccacaggatcgacgcatttgttgccagagattaagagagaagtttagatcttttaattttgactgaggtggcttttccttcttttctttaaccaaggacttagactcctgaaatgttggggaaaaggttgacagggaaaacatccaccctcttcctgctgtttttcatctctatatttttctcttttgtggtggtgtggtggtgggcaataaataaaaggcatttcatttcaggggtaacctgggcagattttggaaaatgtagacagattgcaaaatcatcctatgttttcataaagtaagccctgtaatatccagtcctttattttttttttttatttagagagaggttttcactctgtcactgtcccaagtagctgggactacaggtgtgcaccaccatgcctggctaatttttgtattttttgtagagacagagtcttgctatgttgcccaggctggtctcaaactcctagactcaagtgatcctcccactttggcctcccaaaatattggaattacaggcatgagccactgtgcctggactgtaatagtcatttctaagtaattctaatcataacataaaagggtgtcttgattaaacagatactttattaagtcatctccatgagtcagtcagactgacaggttgctggttgattctgcagtaattggtgaaattcatcagtaattctcttcaagagtcactccggctctgttcattcattttatattgggaggaggtcctcatgaaattagttactgtataggtctcaacctatgcattctttcattgttgctgtggaaacaagcaataaaaatcgtgggttgaagaagaaaaataatcggtgctgaacatctgtaaaatacatgataattaacttgctttctgtaatccagaattttaaaaaaatcatcatacttggaacaaagctgagactcataaggttctgaactaattatgtaactgaatcattaatagttttccttggaaacactgtggaaaacaaattacgccgcctttaaaggagtgtttccactggtagcagcattcacagagccgctgccatcagctctgcagcgtgagctcagtcagatgcatgcctggacacacgccaccagctggtcactgtttcaatagggtcgggaactagatggtcgggaactagagagacattgtcaggagaaacaaggtcgcagactgagcaggatgctgcctgtggttcttctcgtggctggctaacgggctgtgaggggagaggcagccagggacgctagcactggccgccatcccccgggggcagttagtgagacccaccctgcccccaccctgtgcactgtgagagtggcagttagaattggttgtcacttgtgggtgttttgtaaagtgcatttctgatgttctttgaaaggacagaacatcatgggtttggtgccctgtgtcacaccctgagtccatggggacaggcggagtcagggttggggctggaagagaaccgagagggcatttaatccagtcctgttatgttattgacagaagaaacagaggctctgagagggtgagggatggaccaggccgctccttgctcaggaatcacagtgccggtccctgctggccagtctcgggctgccttccacatctctgtgtggattttcccctgatgtcttcagctgtatcttgctggtttgaacaattttcctttcataaaatattgtagttagggcagtcactctgcccaacagtgttgggtctgaccaattaaaatatgcttcattaattttttatgatacccatttttatccaaaagaagaaaaaagtcattttgtgcttctgtgaattctttcaagtaattcatttatgtttattttaaaaataagtatattgttcctttgtcaaccctaaagccacaaagcttatgggcattttattggttgactctggctgacctgttttatctgggtgtgagatacagatacatagtgtatgggtatttggtggaatgctgtctcaggtcattctgctgaaaagtgatgtcaggacatcagtaatgtggatatgtttcagtagtttggtaaaagctgttatggagttgtaaaaattagcctagtataaagcctataaacccatcttaggaatattctatttccagccaaatcataggtgctcctactctgtgatagttcatggtgacgtggtatgtggggtgtaaagtgtgatgatgtcatgcagcaggttcaagtgatggagacatgtttttcttttctgctcttttgcaggacagacccacgaagtcaagcatgcggagtgcagccaagccctggaacccagccatcagagcagggggccacggcccagaccgggtgcggcctctgcctgcagcctcttccggcatgaagagttctaagtcttcaacttccttggcttttgagtcccgactcagcagggtatggatcaaaatgcacagggccaggcagagcgcctggataccctgggttgggaggattgaagagggcagtaagcaaaccagtggcctctcggggcagggaaggaggctcccaaggaggggtcgcaggaggaccagcatgcctggacatgaaggaatagagctagcgggtgggagtgggggccctctggggtccagaaaggaggtctgcaaagtgtttaacacagtaattaaggtcctctgccctgggttgcatggacatcccggcagttttgccccaagcacggccctggataggggtcgaggtcatgcacgatctttgcagccccccacaatccagttgtagttcttcaagcccctcttactggaccccgcagcagcatggacgctgttgattacgcccttcatgagggagtgcgttctcctctggttttctcctccccccatccctttggtctctaaggttgggtgggcccatgccacattcctagactcatctcttttctagctgcattcatttctttacatgagaggctctcaccgtgcaaagcctagtgcctccttagctgccctgagatgaattcatagacagtagcacctacctcatgcaatactttagaaaagtcaatatgatcttctatattagcatggatttccatctgcacagctgtgctaaaggccttgagatgctccttaaagcaccacgggcgtgacagctacaatgcagatggatttgagatgcagactgatttgaattgtgttgatgactcaactacggtgaaggctgctgcagaaggagtgacgggattgttttgaaatagcagacactcttggtgaagttctgaaccaagcatggtgccggctccctttgttttagtatttttggacttagagcagacactcttggtgaagacactcttagagctaggcaaggggcacattgtttttatgagtcaaatggagggaggctctaggctcagataataataaaaggtgttccacctgtgtcagtgcctgcggaatatgtggaaagtgtgtgggtcgtggagcagttctttgtgtaagattgtcatgagcattttaggacatctgaatttcctgtcctcctacccgttaaatattagtaacacatccagtcatggtgacaaccaaaaatgtgccctcagattttcaacacatcccctgagggacagccctgtccccattgagaaccattgttctaggtgacgggtccattctcatggcttttaacactctaagtggataacgtccaaatttgcatctccagctgggacccctctaactgcctttgtgacatcacccttggatgtccaaaagtgtaacatgtccaaaaccgaatctcaatgccttcctctccatctctctcaccatcccctaacctgctcccccaaatcttcccatttgtgtaaatagcaactccatcttcttggttgctcaggccacagccagtggcatcacccttaaaccctccttttctcatgtctcacagtccatcagtgaaatgccatcacttctaccttaaaaatatgtgtcaactccaaccaattcccactgcctcccttgtgaccagttgggtcatgcccccacccttctgtgccctagtcctggtccttggaacacctgagtcatgtcacttctctgcgtcaaccctctagtggctctccccattcactcagagtgaaaagcagagtccttgaaatggccagcgatgccctcagggcccaaccctgtcccctgcctctcaggtgtggtctcgctcctctgtgccctggctcctggagctccagccacacgttctgctggtgtttggtgacagctgtccttcggattgccaggtgcactcctgcggcagtgtgtttgtgtttgctgctccctctgcccggaaagcacctggtgcctctataggaagtgtccttgacctccatcctcctcctcctgctgccttgttttccttctctgctcttgatgccattgcacacacctgcttgtttacggtctgtcttctcatggctggaaagtaagccccctgcagacagggactgtatgcttcttttttgtactcggctctgtccctagtgcttagaagagcacctgctacctggtaggcactcagtatttattgaatgatgagcacacctgttttctggcggtctgatggaacaagaggagcttgggggcgtggggctggcctgagttggaatcctggctctgccacttccccactgtgaagctgcaggcaagctgtgtagctgccctgagcttgtgcttccttgtctttcagatgaaggtaacaccttctttgtcataaggagtaaatgtgggtaaagcatcctatgtgtaattttgtttattattctattatcctggattgaaacatcatttccattatttttgtttttattattttcaacccaacagcacactttaaacttagatttttatgtttattattattttttctatatccaataagcaacatataaacttagatttttaaatgaatacatacattccacaataacagatcattagagctgctggaatacggaaatatttttaaaagcagtgtttaaaataaggcctcggccgggcagggtggcttatgccactttgggaggctgaggtggatggatcacctgaggtcaggagttcaagaccagcctgaccaacatggtgaaatcctgtctttacccaaaaaaaaaaaaaaaaaaaaaaaaaaaattagccttagccgggcgtggtggcatagtcctgtagtcccagctacttgggaggctgagacaggagaattgcttgaacctgggaggcggaggttgcagtcagccaagagcgcaccactgcactccagcctgggtgacagagtgacactctatctcaaaaaaaaaaaaaaaaaaaaaaaaaacccacaaaatatataaaataaggccggaagaagcataggaatgtttctaaaggacaatgaatgagatgctggacacttctcccattgataggttcatgttttggaaacttgttccaaagagaaaatgtcagggaaaagcaaatacagtcattccttggtatccttgggggattggttccaggacccactgtggataccaaaatccatggatgctcaagtccctgatataaagggtgtttgcatataacctacacacatcctcccatatactttaagtgatctctagattacttatgatacctcatgcaatgtaactgccgcatacatagttgttatactgtgtcattttaaatttttttattgttgtattgttaatttttaaaattaatgttttgaataactttttctgcacttggtaccatgcgcatattaggggccttctgctctccttcccgattcctgtcctctccaggcctgattctgtgcaggaaaatgatagggcttgagggaaggagcagcagaaagaaatgtagcccgcctgacctttccagccctggttctgttcctctgatttgaccttaatctttccacctatggtatgggaagaagaaaaatactaaaaaggaagtcagagagcagaagagagaaagaggaaatggtggtggacaaaaaagcaagtaattttccctcccaatattttactgtgacaatttgtaagcacacggggaggttctacagtagtacaggggatcccacagcagacaccatagaccaccacctaggtcctacagttagcatctcactatatttgctttataggaaatggatagatagggtttcactggtcaaaacaggaacactgagacaaatccactgaaagtagaactgaatacctgactttctttttttaaattttaattcgaattattatttttttaaaattttactttaagttctgggatacatgtgcagaacatgcaggtttgttacataggtataaatgtgccatggtgctttgctgtgcctatcaaccagtcatctagattttaagccccgcatgcattaggtatttgtcctaatgttctccctccccttgccccctacccaccaacagacccgggtgtgtgatgttcccctccctgtgtccatttgttctcattgttcaactcccacttatgagtgagaacatgcagtgtctggttttctgttcctgtgttagtttgctgagaatgatggcttccagcttcatccatgtccctgcaaaggacatgaactcattcttttttatggctgcatagtattccatggtgtatatgtgacgcattttctttatccagtctatcattgatggatgtttaggttggttccaagtttttgctattgaaaatagtgctgcaataaacatacatgtgcatgtgtctttttagtggaatgatttatattccgttgggtatatacccaataatgagattgctgggtcaaatggtatttctggttctagatccttgaggaatcaccacactgtcttccacaatggttgaactaatttacactcccaccaacagtgtaaaagcattcctatttctccacagcctcaccagcatctgttgtttcctgactttttaatgatcgccattctaactggcgtgagatggtatctcattatggttttgatttgcatttctctagtgaccagtgatgatgagctttttttcatgtttgttggctgcataaatgtcttcttttgagaagtgtctaaatacctgactttcaacattggcctgaactgaaggagcagtgaaagaaagcagggtgcagaggctggggacgtggacactcagggagggtgcatacactcctgtaaatcctccttgtggtatctgagcacagcccagaaagaagagaacctgcagtgtcatttgcgaggcccaggtctattaattggggtcctcttggttgcaaatgatgaaacattggcttaagcttgcttcagcagaaaaggaatgtactgagcagatcctaaggctcccatgtcactatgagcgggacaaaggtgcattttaacaaacccttcctgtgactctgatgtctgctcaagtttgagaagcggtgtccaaccataacatgttatccaccagtaacgaccagattatgttatgtctgatgattttagggctgtgaattcttttctacatctttgtggaattgagaggaatttcttagttactttaatctgtgaggcatttgaactttttccttttatatactttcttatacaggtggttggcagcttaaatatcagtgaagctgttaatgaagatacttactaaatagcaaagcagcaccgaagtgcacaccttcataggatcttctggagcaagccagaaatctcaagtggtgctgtggccaggaaacaaagcaaaaaatgcagtggtgaatagagaaggagcaagaattagtaactgagactggtagctttccttttgatgttgcatccaaaaagcagtgacaaagtaagagtagctaccttcagctgtttgttttgaaggacacgtgggatcagttttttgtctttatgtcctacccccaggaaaccttttaagctaccagtctttttcaaatggaattcctcgtggaaggtgcaggggaaatgaagtgctccccttgaaagctttgctgctacccaaactccatgccctatgggagggaggtggcacagcactggcctgcagcacatcatacttatcctgttgtctgggaaggacaggaccacatctacccacagtgcagcataaaatcccctagtccaagaggagacagagtcagctgagtgtggctggctcacaaaatggaacacaatagctgatgtgtgttatctctagctgtgcctggtgcatcacaggcaggcacactatgcatttttactgaatattgttcttggatggatttaccgaagaagagcctgaggttcagagaggttgatgacttgcttgatgttctattgtactctctggaatccccgttgcattgcgttcatttttcctaaaaacactcccctcctccctcctcctccttgccttaatttgaatttagtttttacaggataacaatagtaaaaacaataatgatgattttcatttgttatcgttatagttggtgtctgttcaatgcatactgtgtcagacactgttatcctaagcacactgcatggctaacttgtttaatcctcagagcaacactctgaagtgggtaccatgatcatacttactttttaggtgaagaaaccaaagcacagagaggacgtgatttgcccaaggtcacacagctaagcactggcagagccaggattcagacccaggtggtctgtattttcagcccttggccactaaactgtgctgccacgtgacatagcttttttcccaacccctgtgacgtgggatggggacctcctggctcctgttggtcttcagcctggtgttgctgtggaagacacccacccctccagaatgcctccctgccctctctgcctgagaaaaactgaatcatggcctcttctgtgaggtcttgggactcccccagcccctcctgggctttctccacattcgtttctctgcagcttagtgctgtcctcagtgtgttctgtgtggttatatgggaacctcctctttaggtggttaactctgatcggcagggcctcctgattcactttgacattcatgccatatgcacagcatacagatcttctaagtggacgtaggctaaagatgtacgtccagcctctagtgggtttttggtaaagcttagctgaattacagtgttcagaatgggagggacaggaatggagaagccacaagcccgacagaagcagccctggcaaagtgacaagaagggagggaggggtttggagctgtttctcctgccgatcttcccttccctctcccacatacatgtggagggctgctgcagtctccctaggagcatggcatcccaggaggagtgcccccctctctccccaggacgtccgcatcccccgtccacttcctcctggcactgaaatctggactttatctcactgcaggattcactgaaaggctgttggatggctggaatccccttcagcctttacagctaacatactaggtgttcccatattctaagggctcttttactgtgggtgagctggctggaggagaaggggagaggagaagggggacgagaaagggagccccaccctctgctcaggacccattgttcacattcttttccgtgtgaaatgttgctgcatccaggccctaggctatgagtggtggcatttctatgtttgtggaatgaatataaagtctgttttaggatcagtggacaaaaatcagcatgtttgaagtggaggttacaatcagttggttagtacgatatttgacatttaccctgggcccttaatggtgcagtttttctgatgtaaggagggtgaaaaagcagccactatgtgtactaaacagaaggcgtgatgagtacagtcagtgcaggatcgtgaaggcatcagcacattccttcttcagctaatcagcccagacagtgtggggtatttttgtattctctgctgtttgtgctctgagtacatgtgcacaaaatgcagtgacactgatcaataaactctttaagcctaataagcatatgcagtctcatagcaatgaggacataaacagggagaaggatcttaggtgattcaaattctcttttgttggccaggcacggtggctcatgcctgtaatcccgccactttgggaggccgaggcaggtggatcacctgaggtcaggagtttgagaccagcctggccaacatggtgaaatcccgtctctactaaaaatacaaaaattagctgggtgtgggggcacgtgcctgtaatcccagcttcttgggaggctgagacaggagaatcgttcaaatctgggaggcggaggttgcagtgagccgagattgtgccactgcactccagcttgggtgaaagagtgagactgtctcaaaaaaaaaaaaaaaaaaaaaaaaaagaaaaaaaaattctcttttggaggtgaggagactgagctaccagatccaaacctttccagggctccatggctcacaggttgcccgattcctaatacagcatggtacttcatgccctccttccaaaggaggatttagattttgtttgtaaatctaaagatgcttctgttgctgccagcctggagaaccaccatggagagccactaggaaaacagctgcaatgatgatgttgaagatgatgagagcctccaacatttatgttcttaataaaatgctttaaatttttaactaagggcacaactctagagatacgccaactgctttctcttttttttttcggtgggggggcgggagacagggttttgctctgttgcccatactggagtgcagtggtgcaatcatggctccctgcagcctcgaactccagcgatcctcccgcctcagcctcctgagtagctaggactacaggcacgcagtgccacaccccactaatttttaaaaaagattatttgtagaaatggagtcttactatgttgctcaggctggtcttggactcctgacctcaagtgattgtcttgccttggccttcaaatgttttctccattttagaattgaggaactgcagcatcagtacctgggtcatataggtaggaagaaggagcgctgctcccttcaccactccctgggctgcctccttcctgtgtgattgcagggaacctcctatatagagatcccagatcccaagtcttcttttgcatgtcccactccctccccacccttgaaaacaaaaacaaaccctgcgatgcagcacttactgctgactcctcaccagagaccccccagccctgagcatggtgctgcagctacctgtgctttccccccggtcactgctactgcttcacccctgttcttatcatgactggcgccacctatgttaccatgccaggtcctcttgcagtgcctcaaaggcaaaactcccactgcttgcgcactgctgtcttgtgttgcctccagctgtcatctcaccaagaccttgagtcccaggaaccaaccccttatggaagggggcagggcaagctctacctctgctgctctggggtggtggctggggatggaggctgtggtgggatctccgagggggtttcacttctgttcccagtaggagtgctctcatttgttggatttcctggtttattctgggtttcagagagcccttcctctcttggcctttgctgtagagtttgaaaattctgtactttgagtcagacttgcagattttagaaatgtcagagaatcagataggggaaaagcagaatccaccgtgtatggcttgcgttattgcgttaagaattcccttaaccactgtgatttccctttttcatttgagaagtcatctagggagttttcaaagtttcaaaccagaattgattttcatttggggaccagggaggcacctgagtgtgcttcttggaagagtgagtaatagtttttctctattgagaaaaagctgccaacattatagactatggtcatttaatattaaacatgtattatacaggtgacctgatggatggtttgagaggttggagagcttgagtgaagggatgctttttactctgagatgggaagtggaaagaccattacagagttctctaagaagggtagtagtgtaacttctggattaactcaagtgtcatgtttggtccatgatatggtttggctgtgtccccaaccaaaattcatgttgaattttagctcccataatccccacatgtcacaggagggatctggtgggaggtaattgaatcctgctgttctcatgatagtgaataagtctcaggaggtctgatggttttataaaggggagttcccctgcacatgctctctcttgcctaccaagagtatagtgagatgtgactttgctcctcctttgctttccaccatgattgtgaggcctccctagccatgtggaactgtgagtcaactaaacctctttcctttgtaaattacccagtcttgggtatgtctttattagcagcatgagaacagactaatacagtccagttgctaaattaggggactgtgctgttgttcagaaaatgtggtcgtgggccaggcgtggtggcccacgcctgtaatcctagcactttgggaggctgaggcaggtggatcacccgagatcaggagtttgagaccagcctgggcaacatgatgaaaccccgtctctactaaaaatacaaaaatcagccaggtgtggaggcacacgcctgtagccccaactactacttgggaggatgagaatcaggaaggcagaggttgcagtgagccgagatcgcatcacggcactccagcctgggcgacagagtgagactcgtgtctcaaaaaaaaaaaaaaaaaaaaaaaaagaaaagaaaaacaaaagaaaatgtgattatgctgacatctagtaactggagttgcacacaaatcatccttttaatgtgaattacttgtttttaaagttaataatttgttttgaaatcttgaccaagattgcatggctaatatgaagacatccaccatcaggctgggagtggtggctcataccgataataccagcatttgggaggctgaggtggaggattgcttgaggccaggagttcaagaccagcctgggcaacatagtgagatcctgtctcttcttttcttttcttttttcttttttttttttttttgagatggatagactgtttgccagtatagagtgcagtggcgcgatctcggctcactgtaacctccatctcctgggttcaagcgattctcctgcctcagcctcccgagtagctgggattacaggcatgtgtcaccacacctggctaatttttgtattcttagcagagatggggtttcaccatgttgaccaggctcatctcgaactcacctggctaatttttgtatttttagtagagatggggtttcaccatgttgacaaggcttgtctcaaactcctgacctcaggtgatctgcccgttttggcctcccaaagtgctaggattataggcatgagccactgcgctcgaccatgtgatcccacctctacaaaaatatttttaaaaaattagccaggcatagtgttgtgcacctatagtcctagctacttgggaggctgaggcaggaaagcccaggaattcaaggctgcaatgagccatgtttgaactactacactcctgcctgtgtaacagagcaagaccttgtctctaaaaaaacaaaaagacttctaccgtcatccctcttgttaaaaggcaatggcgagttactgtttaatgagtagactttatttgtgatggtaaaaatttctggagatggatggtggtgatggttgtacaacatggtgaatgtatttaataccactgaattgtgcacttaaaatggtgaattttatattatgcttattttagcacagtaaagttttaaaaattacaaaaaaaaggaaaaaaaaaaaacccagaaggctagtatttgcaggagtggaactaggactttgcctaaattgcaaacttccttcactccaattttctttttctgttttaatgaagcacagcatatttacaataaaatccataaagtacactaatcttaatcttagctataaagctcattgcatgtttatatttttttacacttgtgtaaccaccaccctgtcaatatgttgaacgttccagcaccccagaaggtttctttttggttgtaactccccgagaggtaaccactattctgacttatattaccatcatttgattgtgcagcttttaaacttaatacaagtggaatcaggcagtatatactcttttgtgtctgcttctttcacttagcataatacctgggacagccacccatttattagtatatcagtaattcatttttttcctatttgctgtgtggttctcattgcatttatcctctctgttgaaggacatttgggttgttctagttttgggctgctataaaaaaggtgctatgaacattcttttgagggacctatgtacttgcttctcttgggtgcggatctaggaatgggattgctgagtcacagggaactgtgcgtgctcacttaggagtctcccttcttcgacttactgcctttcagcaaatgtttgtcctacccctttcatgacagggaagaaagcaaagcaagagcagagggtgttgctttcttctattttccagccttagcgttagtagatactgccactttccaaagcagttatgccagtttacacttccactcacagggcatgagtgttccagttgcttcacagcctcaccaacacttggtattggtgtttattcactttcaaactatggtggggtgagggtggttacaccctgaaatttaaatgatgcaaagatggaaactttaaaaaattgtgcaaatatttaaacttctaactctcagtaaatgaccccaaagccagtggagtaggatggagcagggcttttcccttcagcctgtgtgatgggcggggctcgcccactgcatatcgacattgatttaagggcttttccttactgtgtgctctggatgtcagatacattagacagctttgggcagctgccttctccagtcttccggcactgttcctctccagagccttctttcatgaagacccaacagtagttgagagaattcagttgtggtttttctcattaacgttgaatgtaatctatctgggcctgaagtgtggatcacttaggagtctcctttcttagacttcagcaccttttagcaaatgtttgtcccatgacagggaagaaagcaaagccagaacagagggcgctgctttcttctgtcttccagcctccaagatttcctttctcacctttgaacacattttctgtgtcagatcatctacagaatgcttggtggtgaggccacagcagatactcagattgtttctctccctccacctcctcctggcctatgtcatgagcctttttttgttgtcctggaatttcttttgcattgccctaccctgccttttgtgcatctcccagttcttttttcattggttcccattctttttttcccccaccaggagagcagatttattttttatttaaaatttttgtttagagacgaggtttcactttgtcacccaggctggagtacaatggcacaatcatagcttactgcaaccttgaacttctgggctcaagcaatcctctcacctcagcctcctgggtgtcaccatgcccagctaattaaaaaaaaatattagcgagacagagtctcactgttgcccaggctggtcttgaactcctgagcccagcagtcctcccacctcagcctcccaaagttctgggactacagtcgtgagtcactgtgcccagccacattttttaaggctcattacttgaagtgtgacctgatggtattcttcacgcacagtcttagacactgctctttgaaacagtcatgggagatcatactcggacctgttatgacagaaacaggtttgtgtagctttgcattttttcacttcactctatcatgctactcaaagtgctgttattgtatcttgactgctgggcacatagcccagctcccatgctctgcttgtttatagcgctccttcctgaaaaccacctcttcatcctctctctttccttccaactctctcagctcaagagggccagcagtgaggacacgctcaacaagccaggaagtaccgctgcatcgggggtggttcgcctgaagaagaccgccactgccggagccatctcggagctcacggagagccgcctgaggagcggcacaggtaggagggaccgggcaggtgggctcggcaggccatcagtcctggccgcatggaagcacttcagtgacccatgacccatccattccttccctcgtgaaatatttcttgaccacttaccctgggccggaactgttttaggcagacgatgtcgctgcccacagggagtttacatctatagagtggggagaccgatgagaagcaaaaggtaactgggcgtgctgtggtttctttggtcccttcggaggtccatttgtcaccatgcacgtgtgaaatccttctgacatccaagcagggcggcatatgttctggggctgtcttgatacagaatgcattagaggaatgaatgaaccctgttgatcccttgcgaaggtgggtgtctaatatttgtactgaaccctatggaaagctgggaagagcctcgcccagcagctgtggaaggctgctcagagtggcttggacggcagtggcaacaggaagctgtgaaccttctcagtgttactcattttttaagaatcagaaaagggtttttcaatcattatatttgagttcagagcatgtgaaacatgaaatatcaaagaatttatttaattctctctttgtgcatatagataataactcttaagctttcatggcctaactcttacagtgcagccctcagtgtattgctaaattgtctaagacgggaaaaataactgaaatacatcgttactaatttttaatgtgttgaaggggcacttataatttttgtgctcttttcgtaaaagtcacattcaggctagatctcaaaaggtatattttaatttatcagtttttaaaaagttgaatctgtgaaaaccatacaaggtattcttttcttggatataaagggaatggcctggtttttctatataatggctttaccattgtaaatactgatattgtattaaacatacacacacacttggtttttaaaatacaataaacaaaagtaccatttatttttatcaagccagcctaacagtgatcccaaaagttaataaagccccactcaaaaaaagacagactgggaggagcctaggggcagggtgggaatgaggaccagccgagtcccgggtgtgggacaaattgcgtgtgtgtggtgtgtccccaaaagcaggaaggtggcgaaaggaggcgaatcccagtgggtggagggaggggaaaggcggaaggagaaaaaggtgggaggaggatcgggtgggagggtggtggctcactcaggacccagggggggggcagcgcgatgaggtgggtggccctgttcctgaacggcagccccaagaagggaaaggtggttgctgtatgtggaactttatctgatttgctttctgtggccagtggtaaacttggcataaaagccaccagtgtgtataatggcaaaggtggactgattgatgatattgctttgatcagggatgatgatgttttgtttgtgtgtgaaggagagccatttattgatcctgacagattctaaaccacctgagggattgtcaggattccacatagactggctaacattaaatgctggaggggcggtactttacaaccacacagagcactttagtgaataaagaacctgatagtatgctggcccacatgtttaaggacaaagatgtctgggaaataagcaagatcacagaggagctttcttaattgaccgaagtcctgagtactttgaacccattttgaactacttgtgtcatggagagcttattgtacatgatggcattaatttattggatatgttagaagaagcaagattttttgtattgactcattgattgaacacctagaaatggcaataaagaattctaaaccaccggaggatcattcaccaatatcctgaaaggaatttgtctgatttttgctggcaacttcaatcaagtcagaactgcgatgccaaggtttgaacttcagtggtgctgatctttctcatttggacctttgaaacattaacttcaaaatggccagtttaagccgctgcagtcttgcacatgcaaatctttgctgtgcaaatcttaaacaagctgatctctctggatcagtgcttgactgtgcaaatcttcagggagtcaagacactctgttctaatgtagaaggagcatccctgaaactgtgtaattttgaggatccttccggtcttaaagccaatttagaaggtgctaacctgaaaggtgtggatatggaaggaagtcagataacaggaattaacctgagagtgactaccttaaaaaatgcaaagttgaagaactgtaacctcagaggagcaactctggcaggaactgatttagagaattgtgatctgtctgggtgtgatcttcaagaagccaacctgagagggtccaacatgaagggagctagatttgaagagatgctaacaccactacacatgtcacaaagtgttagatgagaattttaggggctggaggaacatgtacaagatgaaaatgttttccttatcacttttctttctccacccgctcagttgtctagaagaaataacactgtaaggaagttaaaaaaaaatttagaggattatgcttgttctcagtggtgcataagggaaaaaattgacttttttttccatattctgatttttaacagaaaagcactcatttaatagatatagggaaactagatattgctgccttttgaacagggtaggggggtttacctggttttatgaccaggaatagtatctattacatttgcttttaaataggcatgatgtggaaataccatcttggtttgagatgcatttgaggattttaatttatggaaagcacaacatatgcaatttatatttattgaatactagatgcagtatggatatttaaattgtaaaaactttacgaaaacttggaaaaggttgttcaggtttataaatagctttagtgatgcctccttctttaaatacttgtcacagcatatgaatatggtaagatcagactccctaagactcttcaggttcatttttataatgtttactttttagaacaaaacagtagctaaattacagtaatatccagttcttactgattgagacagagtggaaagaaagacatcgttgtacatcactgtcattccaaaggtacagtggaactccggatggaggaagaacttacctatcactacaacacttataaatgagcatttctcagaatgtcattctaggcaagttccactcaacaccagaccaagcaattctgtctattcacactattagcctagttttctcatacaatcagcacaagcataggaagatacttcaaaaccaaaaaaccaaggtgcaccattaatattcatttaattcaaataccaaatagttttacatagggccatcttagaaatagatattaaatccagatctactgcaatcaaagcttacacaatatgaatgaatatggtagagttgcctgttaaaaggcaatgtaatataattgctgctagaaccctacagtggggaatgaggaattttaaacatatatttgattacagccaccaaaaaagtatatataaagaaagtaaaaataaaggcatttggctggtccaagatgtaacaccaatcagtcagcacctatgattcttttacttacattttttactttttgtttttgtttttgtttttttgagacagagtatcagtctgtcgccaggctggagtgcagtggcgcaatcttggctcactgcaacctccgcctcctgggttcaagcgattctcctgcctcagcctctcgagtagctgggactacaggtgcacaccaccacgcccagctaatttttgtatttttagtagagacagggtttcaccatgttagccaggatggtcttgatctactgaccttgtgatccacctgccttagcctcccaaagtgctgagattacaggcgtgagtcatggcgcccagcctgtttttttttttgtttttttttttagtgaaatttagcctgtttttcttgagtcattttctctctgcaacagtagaggaagggcctgtatctccctaccaatgacctggtgtccttacatctaccccaagagcagggatgttagctgtgtccacagggttctgaattctacagactcatcaacatgaggcaaggaatcattgaaaaccacttttgtctcctttgggagaatgactcatctttagtatttatgtagtgtattcttctatatctacatatgcaaagctttctttgacagtaaagggcacatatgcatagtgggagaagatcagacctttacaagtgaaggaaagcaacttcagaaatgaattattttctttgctttattatttttaccaagacagagaagtattgtattgagagattatctattttcataatcaacatttgcctaaattatatttaaatcatttcactttgtactatattttcaggaattatagaatgtgttattcactcacttaaaggtacctctgtagaaataacctaaaactgcagaaggatccgaaagatataacatggtgtgtttagaaactgcagattttagatctaatgtatactgcattaataaatgatgtaaagtgtggaaaaggaaaaaaaaagactgatcccatgatcaaatattaatataaaaatttgagatcagccgggcacggtggctcacacctgtaatcccagcactttgggaggccaaggtgggtggatcatgaggtcaggagatcaagactagcctggccaacatggtgaaaacccatctctactaaaaatacaaacattagctgggcgcggtggcgggtgcctgtaatcccagctactcaggaggctgaggcaggagaatcacttgaacccgggaggtggaggttgcagtgagccgagatcgtgcaactacactccagcctgagtgacaaagcaagactgtctcaaataaataaataaataaataaataaaaataaaaaaaattggagatcaaaatattagtgcataggattcaacaataaattaaaagaacagtagtgtacatcacaactaagtgaatttatgccacccaagaatggatgaatattaagaaattttggaatataatctatcataccatattaacaggccaaagaagaaaaactgtagttatctctatagatacagaacatacatgtgacacaattaacaatctttctaacaacaaactcttgatagactatacatgtgcagagacttctttaatgatgtgtatgtgtcacaaacaaaagccagcgattcccattaaagtcaaagataattcaaggttgcttactatcaccagtcatctaaaattttcggtagatactaaccaaggcagtaagataagagagatgtagaagtacataaatattggaaatgagggaacaaaatgatgattgtaatcagataataacattgtatgctttgaatttcctgaaaattgtcttagaattttctgaaattctattagagacaataagagttctgtatgtggctagttgtagactataatatatcaataactttcttttttatttattttatttatttatttttttgagatggagtctcggtctgtcgcccaggctggagtgcagtggcgcgatcttggctcacggcaagctccgcctcccagtttcacgccattctcctgcctcagcctcccgagtagcttgggactacaggtgcccgccaccacgcccagctaattttttgtatttttagtagagatggggtttcaccatgttagccaggatggtctcgatctcctgacctcgtgatccacccaccttggcctcccaaagtgctggaattacaggcatgagccaccatgaccggccatcagtagctttcttaccagtgactagaaaagataataatgtaagaaacagttctatttataaaggaatgaaagggcaaaatatttagaaatagtgtgagcatctataaaaaaaatcttaaaactcttttgaaggagaagtcttatgtccttcaaagaagacataaataagtgaaagcatatatgtgattcttaggaagattaaatagaattaagattaaacttagtacaagatataaaatgtaataaggatgtctgaattattctaagaattccttttcatcttgattcagtgggaatttgggagtggaaacctgaataaaataactggaatttatctaaaacccgttgttctcaatgggggacgattttgtcccccagttccaacccagggaacaattggcagtgtctggagacttttttttttttttttttttttttttttttggctgtcatgactcggggctgctactgccatctagtgggtagaagccagagatactaaacatcctaggatgcgcaggaccgtccctgcagtggagagtgtcctgcccaaaaatgtcaacagtactgctgctgagaaatcctgacctagcagaataaatattctagagtaaccaggaaaattctgacaatactaatcaggggattaaccttaggcattctggaactgaagaggtgctaggcagctcagtggaacggtggacaaagtgcagaatacactggaagatttagtacaggggaaaggtggcatttcatatcacggtggataattcactcaaaaatgtgaccgagtaagtatttaggaaggaataaagctggatccctatctcattcctcccatcaaaataaattctaggaggattaaagatttaaatattaaaaaatgaaactgcaagactacaaagagaaagcatcagagaattaatttgtagtcttggccttggaagaacctttctaagtaggaacagacacagaagccataaaggaaaagatgaaaaatgtacttacataaatataagaaacttctttgcaaaaagaagaaattatttgcaatacatgtaacaaaatgcttatttacaaagagtttatacaaatcaataagaaaaagaaaaataggccagatgtggtggctcatgcctataatcccagcaatttgggaggccaaagtgggaggattgcttgagcccaggagttgaagaccagcctgggcaacatagtgagacctcatctctacaaaaataaataaataaaaattagctgggtgcgtgcctgtagtcccagctgcttgggaggctgaggtgggatgattgtctcaaaaaaaaaaaaaaaaaagaaaaggaaaaataatataatagaaatatatatagcgcccatgaaaaatacagatggctagtggaaagatactaagccttacttaagaaatgtaaagcaaggctgggtgcggtggctcaacgcctgtaatcctagcaccttgggaagctgaggcgggctgattgcttgagcccaggagttcgagaccaatctgggcaaaatggtgaaaccctgtctgtacaaaaaatacaaaaattagccaagcatggaagcgtgcacctgtagtcccagctagttgggagacagaggtgggaggatcacttgaacctgggaagtgaaggttgcagtgaactgaaatcatgccactgcactccggcctgggcaacagtgagaccctgtctcacaataaataaataataaataaataaataaataaagcaaaacaacaattagatatataatttccgctaatacattagcaaaaattaaaacagtttatcatttctggtgtcattaagggtgtaaagagccacatatggttgatgcacaaggacaagttggtaatatctatctaaatcttaatttaatctttcaccaagcatttctattatttagcacttaacggttactgatattcttggaaaaggatgccaacatgtatgagcaagttcagttgcatgattatttataatagtataatatgggaaacaacctaagtatgtattcatacagggctggttgaacaatgtgattttggtgcagtagaatagtatacaggcatgaaaatgaatacagtagatttgtgtgtactgatagggaaagatttccaatatacattactaagtggggaaaataatatggtgcatatggtataaccttaatttggttttggttttagaagtatatattaattattaaaatcaacttttttttcctggaaggatgtcagaatgattatctttgaggagagttagcagaattgatagtggcagaggaaaattttttcattttagattttcctgtgctgtttgaacattttaaacatatgcatacattgctatacaaaattaaaaacaaggtaaatacaacataaatttagacaatataaatataaactaaacttttttttgccttcacaaaatccttcctcttctacttgccttttgtagtgttctttagccatttgttggtggatttttttttattgtttgcttatagcatctgctcctttgcacaggattctaggaaaagaccttggtttcatattggctcctaaagtagacaagttcccatgccccaaggggcattggcatcctttatttgtcaaaggaaggaaataactacatatctactatacagtgatgttgggaaaaaggtctgtgaataatttatatagactgtaatgaaaagtaagtgacagttattattctcctagttatacaaattgtttgtcagttacttcatttaagtgaaattaaattatttgagttaatagggttgaatttgaaaattacattttgtttctgaagcttttatttttttaaatttattttattttttgagacggagtttcgctcttgttgcccaggctggagtgccatggcgctccacaacctccgcctcctgagttcaagtgattctcctgcctcagcctcctgagtagctgggattacaggcttgcgccaccacgcccagctaatgttgtacttttagttgagatcgggtttctccatgttggtcaggctggtcttgaactcccaacctcaggtgatccacctgcctcagcctcccaaagtgctgggattacaggcgtgagccaccacacccagccaagagcttttatttttaaatgtcagtagtcctcaacatttttgtagcacctttggacagctgatacttttgtacattgtcatgctgtccccagactgcctcatttggaataggtgaataccagtctattaggacagaccattaggagcagtggtatgcagtgcctgtctgttgcaggtgttatcacctctacagttgtatagtattgtttcggtaatcatttcaatatttgattgcattttgtctattttacatgcgtgaaaacgaggaaaatgaaagtgctggttgggattacagcaactagttgtacaggctgaacatcccaaatccaaaaattcaaaatcccaaatgcttcaaaatctgaaatgttttgagcactgacatgatgctcaaaggaaatgctcactggggcattttggattttggatttttggattagagatgctgaactggtaagtataatgcaaatattccaaaataaaaaatcagaaatccagaacacttatggtcctgagcattttggataagggatactcaccctgtagtaataagcttgggttttaaaatctcagtactgccgggtggggtggcttatgcctgtaatcccagcactctgggaggccgaggcaggcggatcacctgagatatttggagaccagcctggccaacatggcgaaaccccttctttactaaaaatagaaaaaaattagccaagtgttgtggcgggtgcctgtaatcccagctacttgggaggctgaggcagaagaatctcttgaacctgggaggtggaggctgcagtgagccgagattgtgccactgcactcgagcctgggcaacacagtgagactcagtctcaaaaaaaaaatacagttgatacaaagatggaaattatttagtgtgttagaaattagatgttcactggacttaaaccaattttctataggctcagctgtgaaggaaaagaataaaattaaaggaaattgggggacttctggcaatatatagttgatttcctttcagaggaaatttcttttcacaggaaatcaactatatattagacttgtagggggcagaattctttttatgccatgcaagacttagtttttgtacttttgacttggggacaagttttctacgatgcatagcatggtattatctatattttatttcaattgtattaattttgagaaagatttttgtcatgaaattttaatacagtgttgtgattttgaacttacaagaattaaatctatagtcagcctatattttattgcaccctttcctgggagctgatctgtcctcagggagaatccctgaaatctactccaggagaaatcatgtaatcttttggtcgtaataattatattattgtctcagccttgcctagggcgccaacttgccatctgtcatgggtggtattggaactgcttgaatggggaggcatgagcttcctcattcttttcaagactatttccagtttctggtttccaggccttatgctgttctctggggctatgccaaagtttgctccaacaatagcaagaacacagcaaaaatcacaaaaggggcttctatttttgagccctgccacctgcctgcactgtgccggcttctctgagctgctgtctctattcatgctcacaatagccataggaagagcatggttattttatctagaccaggaaccttggctttggaaaggtcaaaccagttttactttttctctcccgtgcccaccacaggtttccatatggaacatccactttttctaattggttttatttcattaatattattcacttatctgaattccaaaaaagaattctgaattcttttttttgttgttgttgttttttctatagacggagttttgctctgttgtccaggctggagtgcagtggtgcaatcatagctcattgcagcctccaacttctgggctcaagcaatcctcctgccccagctctcgagtagctgggactacaggtgcacaccaccggggtctcgccatgttgcccaggctggtcttgaactcctgggctcctcctgccttggcctcccaaagtgctgggattacagacatgagccactgcgcctggcctggattccagttcttattattctttttctccctgaggtgtcctttgtgtgtatctcatgttacacagtggtgtggcttttagagaatgaggaggttccttgtgtgcagggtcctccctgcctgccccagggtcaagtgaaaggttgtggaacccccagaaggctgtcaaggaatccagccactaggtggcagccttgtcaaaagcacccaccttctcctctgctacaagttctggttctgacaaatgtttctgactttagaaacaatgcttgtatttattgattaattcaacaaatatctttgagtggctaccatgtgcctggcactgttctaggcaaaaggactatatgagtgagcaggacaaacatccctgccttcataaaggtacatgagcaagacgtgggagagatgagaaagccaggtgaacagctggagtggtggacattccaggcagagatgacggctggcccgtgtcccccacgtcaagggagtggcaggaagaccagtggggccgcagcagagtgaacaagcagttggggaggaggatagaaagatgggggagcttgcgagtcactgtcaggactttggattttttactcttgactccactggggaacttttgcaaggttttgcacagagcagtgatatgacccaacctcattttaaaaggactgctttgggctgcttgttgagagtggacagatggggtaagcagaccagcttggaggctagggctgtggtctaggaaagaagtgacctgggctgggctggcagccatggcaccggggaacagcagctgcgtctggatatattctgaaggggagagccagctggctctcaactttcctggtttttgaattgtggaaaaatacacataatcatttttaagtgtacagttcagcggcattaagttcattcacattgttgtacaaccatcaccaccttccatttccagaactgtttcatcttctcaaagtgaaactctgtccccattaaacactcgcttcccattccccttccctcagctcccggcaagcaccattctgttctttgtctctgaatctgactgctctcagttcctcataggagtggcatcacacagtgtttgtccttttgcaaccggcttatttcactcagcataatatcctcaaggtacatccacactgtagcatgtgtcagaatttccttcgtttttgaggctaaataatatttccttgtctggatataccgtatcttctttatccattcacctgttgaaggacccttggcctatttctaccttttggctattgtgaataatgctgctctgtacacaggtgtacagatatctccttgagacactgctttgactttttgagggtatatacctggaagtgggattgctggattctcctgatggattgtaaagttggtgtagggtaagatttctgctcatgttagcagtgggatgagtgagatgaaatctgatgggccttcccaagggatgaggagtgaacgtggatctcttctggagacagcagtcggctagaaggaggttcatgtagccacatttaaaacatttttaaaaccacgagacatggaagtgcccatttagatgtttctttatatagcacacgtgggatccaaagacatgtcactattttaaactgatatcagtgttttctaaaaggcaaaataaatgtgaagggctagttttactgtggccaaactctgatgcttgcagaatctcagacatctcagatggtgatcagtaagggcaagcagtcgtgattggctcactgccaagaaactgtcagtgtcctcgctgatacctggacccctgcatgctcccagttacctgcatcacaaccaggtaatgcctgaggctccaacctgagacacctgtcctctctgacatgaggagggaataactctgtcctctctgacatgaggaggggaactcgtctaacatggaaggtaagtattcttatccccatctgacatgtgaagaagcgaaagctccaggataggtagtgttcccaaattcaaacccaggtccgactccagagttcttttttctgctactctgtttgtctcaggtagggagacttgttttcttccctcatcatctttacctgttgtagaattactattaccggtgactagcattctttgctcactatgtgctaaccactgttctcagtgtgcgatgaatatggtctcctttagtctttactacagccctatgaaatagtatccttattatcattcccattttatagatcaggagactgaggcataaagagattaagcagactgtccaagtccatgggatataaatattggtaccaggacttgcagattaggaaacaggggctgaaagaaaaccatggatgggttggcttgctggggtgagagtggaggaaggggatgttggaagttttggagttgagaggccggaaggtgggtgggtcagtttcttggatgccacagaaggaggagggccatgagccagggatgtcagggaatggggagaatggggtggggatgtgtagatggcaacagggaggggaagaggatgccaggtcctgctgtgtgaactgcagaaatggaaggtgtctgtttacagtggggaggggaacagacggggggaagcaacagtcataggtatgaggtacagcgagaccttcagtttgggaaatgtgagaaaatgaacagactggccttgggaaggcagtggtgggattcatccagctgtggaagtgaggggacattcagagagctcagcctatgggaaatgttgatttcactgtgagttctgaagggccctgaagaagtgttggggactcaagggaggggcctggggcaggtggggctgaatcgctttggagatgagaacctggaaaatcacagaatgccaggaatgagtttgttcttgttttcataattttagagaggtcatttatcaatgagtatattttgtgataaaaaaaatttcagattcggtatagatgctcctccacttacttcatcggttacttccagataaactcatcataagctgcaaatatgctaagttgaaaacacatttaatgcacttaaccttccgaacatcatagctgagcccagcctgctttaaacaggctcagaacactcatatgagcctacatttgggcaaaatcatctaacacagagcctattttataataaagtgttgaatatcttacataatttattgtattagattggtgcaaaaaagtaattgtgatttttgccattttaaaaattgcaggccaggcgcggtggctcatgcctgtaatcccagcactttgggaggccgaggtgggcggatcacgaggtcaggagatggagaccatcctgactaacacggtaaaaccccgtctctactaaaaatacaaaaaatcagccaggcatggtggtgggcgcctgtagttccagctactcgggaggctgaggcaggagaatggcgtgaacccgggaggcggagcttgcagtgagccgagatcgcgccactgcactccagcctgggcgacagagcgagactccatctcaaaaaacaaaaacaaaaacaaaacaaaacaaaaaaattgcagttacttttccatcaacctaatttactggaagtgaaaagcagaatggttgtctgggcacttgaagtacagcttctactgaatgcgcgtcatgtttgcatcaccttaaggtcaaaaagggtaagtcacaccatcataagttcggaactgtctgtattttcattttcttctattttattctacatttaattcattttcacattgtggtaggagatctaccctctgaacacatttttaagcatgtaattcaggggcaatgctgcatagcaggtccctcaagcttacgcatctgtacccactgaacgactccctgtcgcactgtctgcagcccttggcagccaccactcaactttctgtttctgtgagtttgactgtttgagattctgcatccaagtgagatcatacagtatccttttgggactggcttatttcccttagcatagtatccttcaggttcatccacaatgggacatgtgtcagagtttccttccttttaaaggctgaataatattcgatcgtctggatagccacactttgtttatccatcatacatggatggaccagactggctttcagcttctggtggtgtctgaggtaaacccagttgtgaggatgttatgaactctgcactagttaaggtgctgaattctaagcttgaggacacacatggtggtgtcgtggccctgcgtttcccgggagtacatgatttagtcagggctttggagtggggccaagggttttctgtgactttctctgttggcacaaggtgcagtgctggtttggggatggcagctctcctgggtcctccctgggtgcctgtggtatagacagtggggagctctccctgcacctccccgaagaatactgacatctttgccaactctttccatccaggtcctggctgtctctccagttctccatgtcctctcttccttttatttgggctcttcccctgaagtttgctatttcctttctccctccttccctgctctcctctcctcctttcctttttgttgagtttatacctttgtttatgccttccctcccttcctctcttcttctctcccttcattccttccttcctttttgttgagtttatgcctttgttttatacttttattcctattgtgaatgggattctttattcattgtactttgttcttattttctaacatatggactatttcacgactttgaatgtcatccttacacaggaaccatgctaatcttctctgcatcattccagttttggtattagcactgtcactgactatattttctaattagatactttaaaaaatatttagtttggaactggctcgctcccttaccatcctctcttcttagcactaatggttttcagttgattctcaggtgtcttccaagcagacagtcatatcagctgcagataacaatgccttttgtctcctccattccaggagttattcttttatttctggttcttgctgttttgtgcatgtgtgaccccagttgtgttaaatgctagtgacatcttgacttgctctcactttactgtgggtgattttggtgttttctgattaaatatgatgcagaaagttggcttggggctttgttttacatgttaagtcttctcctcctatattcctttgagttattaggatttggtcatggcttttattaaatgccttctaggcatgctgttattactttgattattgcttctctttttaccctggagtctcctccaggaaattaaagtatgtgtgtatttggtctcctgggtatttcttccatgtcacatatgttatctctgattcttgtgatcactttcattcatgctctgatttttcaaagtttatcatctaatgtgctttgctttgtatgtttcttttcttcaactattatgtttttaatctttagtctgatttctgtgctttcaaattatttcttcatgacttcttgctcaactttcatagctatcaaatcttgaatttcaaatgagaatgcaaattgcagatttttttgaaatctcccatttctaccagtaactttgtttcataggtgcatatttacttggaatcctcagctgctcccccttttatgatctgccagagctttccagatagatctagagagttttctgtgatcacctatctttacagagggaagctagtattggtccaaaaatcagaaattgagagggatactactggagaatgtgtggttatcaggtcatctttttttttttttttttttttttgagacagactctcactcttttgcccaggctgaagtgtagtggcgtgaccatagctcactgtagcctggagctcctgggctccagcagtcctcttgcctcaggctctcaaagtgatgggattataggcgtaagccacagcgcccagccaggtcatatcatttacgctctgtcgaaggaagaggaaaaatttttgcattatctggggtgaaagtaaggagggcattaaagcctgaagtgcaattttgccatttttttcttttctatgtattttgtttttgttgttctcattgttactttagtgcctgttggaaggtggccttgtcctccccttctgcttgcatgatggcccctgttcttatcagctggccatggctgtttcccttgtgtggccttctgtgcatgcaggcaaggagaagggaacactagcaggccttctgaagctgctcatggcagaggcctcaacttagtagtccagttacccttttaaatgatgacgattctgtaatgtgccctttaatatcctaaaatgaaattcaccagtccatatacattactgaaaaaaatcaatataatgctgtacctataatgtagagaagaaataaaaggcaaataatttctaatgaagtgacatatcagtgtgtaagtgctggagcctgactccactagaagacagatgcttgtacattagtggagattgctgccttaagcttgaatgctacaaatgagactgactcatgggtgcagtgttgagaattcaaataccaggcgtgttgacatcagtgactttgaaatgttgacagctcagggtaaacattttgaataaagcaaagtactgtctttccttaagttacatgatagttgcattcctagaaaattcagtgtataatagcaatgctgtgtgaaactgctttgtgtttctctgtaaaacagagttagattctggatgtaggtatttataactgtgttctcctattcaggagtgctgtcagatcacaaggagggagcaggaagcaggaagcaggcgtgcccctcatatttgcaaggcttggggcaagagtgcagcgggggccatctgtttattcacaatattctgatataattaaatattctagtaaaggagatcaagtgtcagggatttcagatgacctggtagcttgtcgatctaatgacaataattttcttactcattttcatcttttttttaatcagtaatgggtgaattttgtgtggtgaattttattttttcttcccagcttcccccaagttctactttagtattttctcatttttatcactttgaaatttgtaattcttctcaaaggttaaaaaaattaatgatattcaaatataattttaaaataatttttcttcaaaatagaaattaaagtcaatataaagggtgaaatatatttcatatttttaaattttttaatttaattttttatttttagagacagcgtcacactctgtaacacaggctggagtgcaatggcatgatcatggctcagtgcagcctcaaactcctggcctcaaacgatcctcctgcctcagcctccaaagttgctgggactacagccatgcgccaccatgcctggttaattttttaaatttttttgtagagacaggtgctcactatgttcctgggctgaagccatccttccatcctggcctcccaaagtgctgagattatgggtgtgagccactgtgcctggcctgttttgtttttttttgttttttttttttgagacggagtctcactctatcaccaggctggagtgcagtggcaccatctcggctcactgcaagctccgcctcccgggttcaagccattctcctgcctcagcctcccgagtagctggggactacaggcgcctgccaccacgcccagctaatttttttgtatttttagtagagacggggttttaccccgtgttagccaggatggtctcaatctcctgacctcgtgatctacgcacctcggcctcccaaagtgctgggattacaggtgtgagccaccgcgcccagccagatttcttttttttttagctgttgaattttgtgagttctttatatgtactagaaactagttctttattggatatgtggtctgcaaatatgttcttccagtctctcttttatcttttcaaccttataacagggtctttcacagaccaaaaattttaaattttgatgaagtccaacttgctaattttcccttctatagattgtgcttttgatgtcaaaattctttgcctagagccagttttgttgttgttgttgttgttgttttgtttgtttgtttggttgttttgagacagagtctaactctgttgcccaggctggagtgcaatggcacaatcttggctcactgcaacctctgcctcctgggctcaagtgattctcctgcctcagcctcccaagaagctgggattataggcttgtgccactgcgcccagctaatttttgtatttttagtagaaactgggtttcactatgttgctcaggctggttttgaactcctgacctcaggtgatccacctgcctcagcctctcaaagtactgggaatacaggtgtgagccactgcgcccagctgcctagagccacttctttaagattttctcttatatttttcccgaaagtcttatagttttacatttacatttaagtgtgttattcatttttagttaatttttgcaaaagttgtgagacttgggtcaaggttacttttgttgtggatgtccagttgctccattgttggaaagggtatcctttctctattgaatcgcttttctacttttgtgaaaatcagttggggctgggcgtggtggctcacacctgtaagcccaacactttgggaggctgaggccagaggatggcagcctggacaacacggcaagatcccgtctctacaagaaataaaaaaattagctgggtatggtggtgcacacttgtggtcccagctacttgagatgctgaggtgggaggattgtttgagcctgggaggtcaagtctgcagtgatatataataacgccattgcactccagcctaggtgacagagcgagaccctgtctctattaaaaaagaaaatatcagttgggcatacttttattctgggttctccattttgtgttgttgatctatatgtctgtccctctgacaatgcctcatactgttgattatggtagctttgtaatgtcttgaaatcaagtagactgattcttcctactttattattttccaaaattgttctagctagtctagttcctttgacttcccatataaatatacctacaaagaaatcttctgagatttgatagtaattgtgttgaacctgtaaatcaatttggggagaattcacatgtttttactatgttgaatctcctaatccataaacatggtatggctctccatttatttagatctttgatttctttcatcagcattttgtagtttgcggcatacaaatcctatacctgttttgttagatttacacctaagtatttattttttatttttgaggaattgtaaatgatactgtatttttaattttggtgtttgtgtgttcattgctagtatattgaaatgcaattgatatttatatgtttgccttataccttgcaactttgctaaagtcgcttattagttctaggaggattttttgtttgttttagattccttgggatttttcaatgtaaacaatcatgtcatctacaaataggtacagttttatttcttcctttttcttttgagtcgttttcttcctctgttgcccaggctggagtgcagtggcatgatctcggctcactgcaacctctgcctcccagattcaagtgattctcctgccttagcctcctgagtaggtgggattacaggcatgctaatttttttgtatttttagtagagacggggtttcaccatgttggcgaggctggttttgaacacctgacctcaagtgatccacccaccttgacctcccagagtgccaggattacaggtgtgagccactgtgcccagccaggacagttttatttcttcatttctgatctgtatgccttttatttccttttcatgtcttatcacactggctagaaagtttaacactatattgaataaaagtgctaacagtagacatctttgtcttgttcctgatctacgtggaaagcattcagtcttcttctttttttttttttttttttgcttttttgaagatggagtctcactctgtcacccaggctggagtgcagtggcacaatttcggctcactgcaacctctgcctcccgagttcaagcaattctcctgcctcagccttccaagtagctgggattacaggtgcgcaccaccacgcctggctaattttttgtattttagtagagacggggtttcactgtgttgcccaggctggtcttgaactcctgagctcaggcaatccccgcccgccttggcctcccaaagtgctgggattacaggcgtgagccactgcatccggccaagcattcagcctttaaccattaattatgtaatgttagctttcgggagtttctgtagatgctctttagcaagttgaggaatttctcctctattccagtttttctaagatttttttttttctgagaaatgtccctctattccagtctttaccatgagtggattttgaatttgtctaatgttttctctgcattgatagatgtgattatgtgacttttcttagcctgttaatatggtagattacattgactgatttttcagatcttgaacctgccttgtaccctctaaagtccacttggtcgtggtatatgattatttttatatattactgaattctatttgctagtattttgttaagaatttaaaaatctgtattcatgagggtctgtagtttgcattttttgtactgacattttctggttttggtatcaggataatactacttcataaagtaaactgggaagtattcctaacttttctttttttctggaagaaattaggtaaagtttgtgttaattcttcgttaaataattggtagaattctgagtgaaatattctctacttagaagtttgtttgtttgtttgtttgttttcatttttttttggcttttttttttggtgtgaaagggtgagtttaaaaaaatttcaaattcaaatttccctaattgttatagggctactcatattacctgcttaatattgagtgagttgtatttttcaagcagttggtccatgtcttctaaactgtcaaattttatgtgtagttatttatttatttatttatttatttatttatttatttatttgttgagatggagtctcgctctgtcacccaggctggagtgcagtggcgtgatctcggctcactgcaagctccacctcctgggttcaagccattctcctgcctcagcctcccgagtagctgggactacaggcgcccgccaccatgcccagctaattttttatatttttagtagagatggggtttcactgtgttaggcaggatggtctcgatctcctgacctcgtgatcctgccgcctcggcctcccgaagttctgggattacaggtgtgagccaccgtgcctagccgtgtgtatagttattcatattatattcccctttatcctttttgagtctgtggagtctgtagtgatatccccagtttcattcctgccattggtaatctgtatattctttctctttttttgtcagaagtttgtcaattttataattttttttcagaaccagctatttgtctcactcgtttttctctatttttttttcccatttcaccgagttctgctcttctttattatttccttatctgaaaaacagagctagtcttacccatctcctacagtgtgagaattaagtgaaatgacaaatacacgtacctaggacagaagcagaagtgtagattattttgtaaaatgtgatttttttcccccttgaactagctcccttaatagaatctcctacttaggaatcatggcagttaaaaaaaaagaatctacctgccttagtgtggtgtaccttgcccagtgtttcaggctttgctttcttaagatttttcttttttttttcaaaatcacacttgactcatgttatgtctagatttacatatacataaatttgagaggaataagaatagtttagtattgcaaactactcctcggccaccatggctcctgttgcaaacactgcagggattcatgaatattccagaaccacctgttgggatggaaagaaaaagaaaatggaaaatggaacttggcacctctggcaaagtgtaagaatgtattgtattcatcctatctgaaaccagtttaacagactgaatcttttgtgtgatctgttgtcaaagcccctcccggctttgcactccgtattcccaaccagaccagtctccactgtgggcagtggtacaactcacaaaccctcacagcgttcagacgcactcttttttgtttcaaggacaaggaaaagagatgtgaagtgtttcttggggcccagatggtgttattcataacagttgatggttagggttacaagattatatattcccatatagaatattcacacattatataagtattacttcatataatgtttatatatgtttaaatataaacatattacaaacatgtatatatttatgtaatataaatataacaaaatatagtataaaatatatattatatattccctatgtatatataataaagccacacctccaatttcaatccaaccactcagggttctttctagccttgcccctttctctgcttgtaaccatcatctctggtagtagtgagaaacatggctgccagtatcctcaatttatgtacctatttgctcaatataaccagtctcaaatccttctcccacctgccacctgcacccaactccccattccccaccctccagcctcactgaccaacccacccctctgcatgactccataacatcctttcactgccccatactcagctcccatgctgaccccttgccctgggaagggaaaaaaaattgggcacaggagctttttaaaaatggtatattataaagccaattaaatgtgcttcgtacttctagttgtttgcattatcagaaagcaagatttcctgctttctttgttgagaaaggtacttcttattgcttaggaaagttttgttttatttttttgagacagggtctcactatgttgcccaggctagtctccaactcctgggttcaagccatcctcctgcctcagcctccagagtagctgggaatataggtgtgagccactgcacctgacatgttgcctagaaatgctgaaatgggggtgaatgagaaatgctgtccctgcaggtaacttggtcaggttccagtatcccatactcccttatggaagaggagaaaagggaaagaattgtaggatcccaccatataacaagttttatgttccagaagaaagttctgcttttctggttctgtgtaatcatcacattggatggaagggaagctgaaggtctttccactgaattcatggaatattaaagttccagtccttgaacttgggtgtgaccttctgaaatgttcaagtttgtcagtggaaaacatgatcagatctcttatgctgcttttcctggctgctgacacacagtagattctcagtgttgtgtgttctcttttcctgaaagtttgtgcatgttactgagtttgccattgaattgtctttgtttgcatattgatttccacttcaaaaagtagtttaatactgtgaaagtactgttcctaagcaaattacagtacagatggtcagagtagaagtgtgtactcttgatacttccctcttccccctcaacagtggaatcttgctgggattttgtcagtgctgtttagatgggacgtttatccttatttgatcaatcccaaaaggcagcccctttgtggtagttttatactgtgaaaattagttttggaacattaagccaagaagtttgcaataaaatcaaatttgtttatgtattcatttgagacagggtcttgctgtgtcacccaggatgcagtgcagtggtatgatcatggcccactgcagccttgacctcctggtcccaagtgatcctcccgcctcagcctctggaatagtctggatggaccacaggcatgcaccaccatgcctggataatttgttatttttgtagacagagtcttactatgttgctcaggctggtcttgaactcctgggctcaagtgatcctcctgccttgacctcctacagtgctgggactacaggtgtgagccactgtgcctgatcccaacatacatttaataatctacattgcagggaattacattaggaaccatgtgtgggggaccagaagataagacttgcacgtagtcaatgcagtaatgagaagaccataagaaaagtctgtataagagagggcataggcatgactttgttctgtcctcttggccacatcctggctgtgtgaccttaagcaaattaacctaccaactacaaccattccttctgttgggaggagccaaatctgtgggagtggaaaaatcactgagaagaagccaaactctaggatgttgctgtagaaagggcctacacaccctgctgtagaaagggtcctagagtttggcttattttgtgtactggggatcactatgtctccttgcaaaccattgcactgggcgcggtggctcacacttctcacacttgtaatcccagcactttgggaggccaaggcaggcagatcacgaggtcaggagttcaagaccatcctgaccaacatagtgaaaccccgtctctactgaaaatacaaaaattagccaggcatagtggcgcacgtctgttaatcccagctactcaggaggttgaggcaggagaattgcttgaacacgggaggcggaggttgcagttagccaagatcacgccactgcactccagtctgggtggcagagctagactccatctattaaaaaaaaaaaaaaaaatctgtcttttcaaactctagtcttttatcaggtaaacattttctaagttttattcattttttttggaacaagtaagacagtttacttattcaaaatgtaaagggttacagtgaaaagttttgctcctgcccctttgcccagccaccaagttcacccaccagtggtggggaatgtggtatctttctagaactattcagtgtgtctggaagcaaaaggatatccttttacctttctgtatgcaaatagtaacgtaaatggacacaccattctgcacgtgcgcattttctcttttcagtgtattttggaaatcattcctatcattccataaagaacctcctcgttctggtccccatctctctggcacttgttttatgatttctcagtggttactgatagcagttcacagcctcattcccaagttatctccgtgtttggggtttaatttccctgggccaggatatttacattcatgagatggtttccttggactttagtttcctcccactaaggtttgagctacactttgcaaatgggcaaagaccatttttggatgtatatgcctgagggaagacagaaaaacaaagctgaaagagcatccagagggtttgccttcaccatcggaaaccactcagctccttttcagggctagcttttcagactgctttccgagatttctgcccactcctgtttggccatggccgtgtgccctattttcagtttctatatatgccctcatgttttcctgagcacatcaagaacgcctgcacggttacactggtttatttaggaaccgtcccctttcttcttcagtctgtcagttactcatttgaggtcagactcacaattctgcgaatgtcttagcctcttggaggagcatcgtgtgtgatgttggacaagctgcttagtgtctctcagctggtttcctcatccataagatggagttaatcgtgcccattacagagaattgtgacaagcaaatgaaatgacacatctgcagaactaagagcagaaactgaaatatagatatttttataaaatgtgatttttccctcaaataatcttctttaacagaatatcctacttaggaattatggcaaaacaaaaacaaacttaaaaaaatccacctgccttagactcttggtcatcttttaagattcttcaagttttgctttctttttttatttcctttaaaaggtttttttaaaattaaatctttattttatttattattttgttttttgagacagagtctaactccattgcccaggctggagtgcagtggcacaatcttggcttactgcaacctctgcctcccgggttcaagtgattctcatacctcagcctcctgagtagctgggattacaggtccatgccaccaagcccagctaatttttgtattttttactagagatgggttttcggcatgttgaccaggctggtctcgaactcctgacctcaaataatccgcccttccacctcccaaagtactaggattacaggcgtgagccaccgtacccagccctttattttattttatttttatgcaacagggtctcactctgttgcccaggctggagtgcagtggtgcaatcatggctcactgcagccttgaactcctgggctcaagcagccctcccaccccagcctcctgagtagctgggactacaggtgggcaccttcatgcccagctaaattttgtttgtagagatggggtgtcactatgttgcccagggtggtcttgaactcatgttcaatcaatgttcctgctgtagcctcccaaagtgctgggattacaggcatgagccaccaggcctagcttgagtcttaatttttttttggagtttccatacaccctctgcccccacacatgtacagcctctcccattatcaacatcccccaccagcgtggtacattgacatgacagatcattgtcacccaaagtccatagtttaagtttgggttcacttttggtggtgtacattctgtgggtttgaatgaatgtataatgccacgtatcggcaattgtaatatcacacagagtagtttcactgcccccaaaatcctctgtgctctgcccgttcatccctccctcatccctagtccctggaaaccactgatctttttactgtcccatagttttgcctttcctagaatgtcacatagttggaatcatacagtatgtcaccttttatattggcttctttcacttagtaatacacatttaagtttcctccatgtcttttcatggcttgatagttcatttctttttagcactgaataatattccattttctggatgtacaacagtttatttatccattctcctactgaaggacatcctggttgcttccaagtgttggcaattatgaataaagcttctataaatactcgtgaagctttgctttaagatgacatgtttttttctccccaagttaccatcacttatcaaccagttcttttttggtcaatattaaatttttccatttttggctccaactagtaaaaatagggccagattttgactaatagatgaaagaatattctggttagctgcagcaattcagagacaagcatgttgctccaggaagtaaggaactccatgtgcttgctagagaggtactcattctctacaagtggaggagctatggagtgacaggattggaagactttcatcaaagtcctttccaaccctgaaggggctgctattaaggtcaaagacctgttcttgggtacattttcttgtatcctcccatgtgggaagctctgttccaagcctttgggttacaagatagacagaagtccttgatgattcccaaacctgcatctcggatcccaacttgcccgttgtactccagaaacactcctcccactgtttgctgaaaatgtctggggaatattctgcatgtgtattcattcattccttcaatacatatttagtgtctactatgttccaggcatctttctgggtgctagggatgcagcagttaacgacaacaaaaaaagtccctgctctcatggatcttacatttcattctcaacatgtcttaaccaaacccatcatcctcgtttcattatagagttgtttaactgctttctctagcatctggatttgtcctaactgaagtggcatttctcagtcctccagatacattctagtgttatctttattaacttcctttctctcaacatgtaattgtcatctacagttgcatcttacacttcttatttatttatttatttattttttgagacgaaatctcgctcttgtctcccaggctagggtgcaattgcgcaatctcggctcactgcaacctccgcctccccggttcaagcaattctcctgcctcagcctactgagtagctgggatgacaggtgcccatcaccacgcctggctaattttttgtatttttagtagagacggggtttcgctatgttggccaggctggtcttgaactcctgacgttgtgatccgcctgtctcagcctcccaaagtgccgggattacaggtgtgagccaccgcacccagcccacttctttttatttcttttgcattcccctgacttcacccaacacagcatctcttacccaaagcacagtagcttcctgacttgagttgctgctggtggttaatgcttactctctcgtcctatgtgagtaggatcattttcggcccatcaattgaaaaagttggctaaaccagggaaacctaaaaaaattaaactatacttttaaacattttattttcacccaaaacatataactgcacatttgttcactcatctttagttatagagccaagacattgtcttacagtggtcttgttgattgaagtttttttaaacatctttccattcttatatctcctatgatttccagttttagtttttttaaacatgagaaagaacgaaaatacttaagaggaagattggatactgaatcctttcacatgtttgcaaatattcctctattataattgcttcagccatttttagtgactcatcttcattgagtcttttcaaaccattcagcatgtcttttgaggaagcgatatctctccctctttgtactcatatttcactagttaatgtacaaagttatggaaataaatttgcaagtacaactagcataaataggtttgggaacaaatatgcttgactcttactatgaagacaacccacatgatgggagcatgagtgcccaggtgtcccagagaggagactaccagccaaaagtgttcatcttgccaagggtgtcagtcagtgtgtcctgtaaacatggggtgcattggttattttggtgaattgattatctgtaaaatgttcagtagagagtgcataagagagcaacttctgtattaccagagtaatcttcctaagccacagctgtcatgagatcacttctctgctcgaaaaccttcaagcactcctcactggttgaggggccaagggcaacatcttgccttgtgattcattgtgatctatggctgtcttacctccctcccccgttggtgccttgactgtgaccttttcacagtcactctggtgaacaacgacggggcctgctgccggggccttgcttgtctaggctgtgcatgtccaagccaagcccctccctccctgctgcccccttctctcctcctgccactgcagaccttgatggatatgctgttcacctggaaaggacccgctcatagtagcacctccttcaaaaagcgtttcttgagctcctttcaacagggcatgctttttcctttaaaaacccttctgcagcaccccatgtgtatttgttaagtcactcccatatcctacctatactgcttctcctgcctaataactctctgttgccgtgagttgaacccagctcactggacctgctcgctgctcattcagcaagcaggcaactcctgagtatgggcgatgctgtcccctttatctcctcttcttcaaagactgtgtgtctttgaatgcgagctcaccaggctcccccaggcttcagtcatgctaactgattcagagcgaggacatggctcttttgaggttgtaaataatacatcaagtcttgaaggcttatctgcttgtctcccttgactttttcaagaagcagctttattgataataatttacataccataaaattcacccatttacagtgtgcaatccagtgaattttagtgaattgactgagttacaaccatcaccgcagatgagttttaagatattcctgtcactccagaaataccccatgctgctgtttccagtcaatatctgtttccaccaccagctccaggcaaccactaatctgttttttatccgtatagctcctcccttgactctccctgccacttcctcagaattggagtgttttctggactaatgtgtgtgctatttgcctaaggaacttttcttccgattcagttacgtaactttgtgatcttctctttcactcattctccccatgttcaagtttctcttggttttctttgttgtgtgaacctagtctctgttcaccgagttggcctttggcttattaagaaaactgagctttttcccctctttcagaatatggaaaacttgaatagtgtcatgtacaaatattgtagtgtcatgtacaaaccagatgctgaatgttatctaccgaatgaaggaatctgagccctgctaaggcatgggaaatcttgtcttctgttacattcagcatagtgcgtgtaaagtcactaaattattattttggttaataaatactttttattttttggtaaggaaaattacattgtttttattaagatgattcatgcttgatagcttaaagagtacaaacaaagtaataccttaaaaagaaaagtataatatgatccagtatttccacttctggttatatacccaaaataattgaaagcaggaacttgaaaagatatttgtgcgcccgtgttcttagcagcattgtttgcaataactaaaaggtggaagcaacccaagtgtccatcaacagatgcgtagatcaacaaaaatgtggtatatacatacaacagaatgtcaggccagccttaaaaagaaagaatttctgacacgtgctacagcatgtgctacctcaaagacattatgctgagtaaaaggattgtgtgatcattcctatgagggacctagagtcaccaaatccatagagacagaaagttgaatggtgattgccagcggctgcgggaggagggagtagagagttattcttttataggtaccaagttttggttgtgcaagatgaaaagagttctggaaatgggggtggtgatggttgtacaacaatgtgaatgtacttaacacctctggactgtacactaaaaatagttgagatgccagcctggctgacacagtgaaagcctatctttaccaaaaaaaaaaaaaccaacaaaaattagccaggcatggtggtgcgtgcctgtagtcacagctactcgggaggctaaggcaggagaatcacttgaacctgggaggtggaggtttcagtgagctgagatcgcgccactgtactctagccttggttgacagagtgagaccctgtctcaaaaaaaataataattgagatggtgagttttatgttacatatattttaccacaattaaaaaataaaaataataaagggaataacagaagaagaacagagaagaaagttaaagtactatctgaaacaccacgtcttagaaacaaccagtgtttgccacaggaatattctttataggaaaaaaaaaaaaaagcctgggcaacgtggcaaaaccccatctctatcaaaaatacaaaactttagccaaccgtggtggtacgtgcctgtggtcccagctactcaggaggctgaggcaggaggattgcttgagcccaggaagtcgaggctgtagtgagctgtgatggcactactgcacgccagcctgggtaacagagcaagatcaagtttcaaaaaaaaaaaaaaaagtccgagcgtggtggctcatgcctgtaatcccagcactttggcaggccgaggcgggcagatcacttgaggtcaggggtttgaaaccagcctggccaacatagtgaaaccctgtctctactaaaaatacaaaatttagctgggcatggtggcacgtgcctgtaatcccaggtacttgggaggctgaggcacgagaatggcttgaacctgggaggcggaggttgagccactgcactccagcctgtgcaacagaggtaagactctgtctcaaaaaaaaaacaaaaaaacaaccagtgtatggggatggttttctaagcatctctttcagcggtggtaccttcgtaacgacaaataccagtacaggttcagagtagggggaatccattcagagtccttgagaggaggcctgcagcagggatggggggctgatcacgcaaggcaggaaagttgtctgtacctgcagcagtgagtgcctgataggcctgtggggcggcttcagtgcccaccacagggcgtgggggagcccaggcaacagggagcctccttctgccattagtggagggaggggcctaggctgctgaggttgagcttcccaagggagttctgtagaggagagaataaagagcacactatgtgagttcactgagagtcctcgctttgagaaaaggtgacacactcctgggactcccagaaatactgcgggaactttgcagttgggacgataagtaaatgactagggccagaaaaatattatttaatactgtttttttcttttctttttttttttttttttttttttttttgaggcagggtctctgtctgtcaccgaggctggagtgcagtggtgcgatcacagctcactgctgccttgacctcctgggctcaagctcaagtgattctcctgcctcagactcccaagtagctgggactacaggtgcataccatcatgctcggctaatttttttactttttgtagagatgtggtctccctgtgttgcccaggctggtctcgaactactgagctcaagtgatcttcttgccttggcctcccaaagtgctgggattgcaggtgtgagccactgtgcccagccagtactgttaacatgaccccattggtacccctagacttgttggtctagggaaacatgagacacacaaaatacataggaaggtgttcagcctataattttcctttatatataagtgaacttcaaaatcttgaaggccaatgatgactttgatttttctgttttagcaatagggtcttgctatgttgcttagattagactggagcttctgggctcaggcaatcctcctgcctcagcctcccaaatagctggggctactggcatgcattactatgcctggctcaatgaagattttttatatttgtaccaaggtctcaaagaaggcagtgggcagataatagaggtgtcacacgctaggaggatggatcacctaatgaatcagtggctgagacaagtacagaggttttttttgtgtgtatagttttatagtgattgatatcagtcttctttcatttagattatagcaaggttattcatatttaagttaagccctattaaggctaaaaacattctaattcaagaaggatgttcaagattctctccttaaagatattacatattttatagtttgctgtttaaagaaactatttgttttctgtgaatcctgaaatgttgatttctctttgaagattctgtgtccagcttctactggagacaaagtggtttagtgtaggaagaacgagtgcttcagtggcaacaggcctgcattaaatttcagctccctacttttaatctatatgaccttgggcaagatagcgtaatctccctgaacctcggtctcttgcttgtaagtagagaaaaagaatggctactgggtcagaccacaccggattcgctggattgtaacactgaggaagtgtgccaagtgcgtaacagaatggaaagtaggtaactcagagggtgtttaattcaggggttcggcatgccaaaaagggtgcaggttctttccatctttttggtcgaccaccctgattgtgctggcttggccctctggccagctcccctcgtcatcacgagataactactagagttctggcaacctcaaaccgaggacagagtcccatggaagaagaaggtttcagtatctctttaagaataagagaactttccccagccttcctcccagcagacctcccttcaaatgtttttggtcagaactgggtctcatagcatccttgacctagtcactagcaaggaaaatggaatcaccaggattaacgtaggctgtgcatgaaggatctactactcagctaagaacaggccaccttctctcagggccagctccctggcaggcaggaaggaaggaaggaagatgtgggaaatggctgataggtagtccacagagactgccacacttgttttgtggtgttaatttaaggtctagtttattatttggatcaggaatgtttaaaaaattaatgggctttatcttttagaggtattgtaggtttatagaaaagttagtggaaagtatagaaagtttccatatataccccctcaccatcacctccagactcccaagttactaacttcttgcattaggatggtacatttcttggaattgatgagccagtgtaagtacattgttattaactaaagtccatagtttatgttagggttcacttttggtggtgtacattctatgggttttgacacgtatccaccattacagagtcatacagagtagtttccctgccctaaaaatcgcctgtgctccacccgttcatccttcctcctaagtgcctggcaaccactgatcttactgtctctacaggtttgccttttttgtcagatagctggaatgatgtagtgtagctgaaaagaagtggccttttcagaccggcttctttcacttagcagtatgcatttaaggttcctccatgtctttttgtgtcttgatcatttctttttagtgctgaataatattccattatatggatgtaccacagtttatcattcaactattgaaggatatttttgttgcttccaagttttggcaattatgaataaaactgctataaacattcatgtgcaggtttttgtgtagacctaagttttcagctcatttgggtagatatcaagaagctcaactgctggatcttatgataagaatatgtttagttttgtaagaaactgacgctgggcatggtggttcacgcctgtaatcctggaactttgggaggctgaggcgggtggaacatgaggtcaggagttcaagaccagcctggccaacatggcaaaaccctgtctctactaaaaatacaaaaaattagctgggcatggtggcgggtgcctgtaatcccagctacttgggaggctgaggcaggagaattgcttgaacccaggaggtggaagttgcagtgagctgagattgcaccactgcactccagcctgggcaataagagcaaaactctgtctcaaaaaacaaaacaaaacaaaactgacaaactgtctttcaaaatggttgtaccattttgcatttccaccagcaatgaatgagagtttctgttgttctacatccttgccagcatttggtgttgtcagtcttttggattttcaccattctaataggtgcataacagtatggatcgtgatttttttttttttttttttgagacggagtttcgctcttgtttcccaggctggagtgcttggctcaccgcaggctccgcctcctgggttcaagtgattctcctgcctcagcctcctgagtagctgggattacagatatgcaccaccatgcccggctaattttgtatttttagtaaagacagggtttctccatgttggtcaggctggtctcgatctcacaacctcaggtgatctgcctgccttggcctcccaaagtgctgagattaacaggtgtgagccaccatgcctggccatggatcatgatttaaaaaaaatactggcacaaggaaatttgaactctggctatttggtaaaaaattattgttaatattttttagttgagataatggaattgtgtgtgtgttttttaaagagttcttatctttagaaatccatgctgaaatatttaccaatgaaataggatgtcttggatttgcttcaaaataattgaagctagaggaagaagtgggtgatagatgaaaaaaattggctctgagttggaaactattgaaactgagttgagaggcatatggagggccattatattagttctctttagttttgtgtatgttgcggcttttcataaaaggtttttactaattaaagtttaatcatgtattatttaaaaatgatagagacagggtgcaatggctcatgctataatcccaacacttcaggaggccaagtagggaaaattgctggaggcctggagttcaaggccagtctgggcaacatagtgagatcccatatctataaaacatttaaaaaagttagctgggtgtgatgacatgaggctataatcccagctacttgggagggaggctgaggtgggaggatcatttgagcccaggagttcgagactgcagtgagctataattgggccactgtattcaagcctgggcaatagagcaagactctgtctcaaaataagaaaaaagatggacactttggtgtttagtaaaaattaggaactgtcttctggtcctacctttgcttaagtttagttcttaacagtattctgaggaataaatgaatatttgttgaatatatatgtattagagtttattattcaaggaatcttcctagaaactgaagatttttggtaatatgataaattttacttgaaattattatttttagagatagggtctcactctgtggcccaggctggagtgcagtagtgcaatcatagctcactgcaaccttgaactcctgggctcaagtggttctcccacctcagcctcccgagtaactgggactacaggtgcacactaccacacttggctgattttttattttttctagagatagggtcttgtgctgtttcccaggctgaattttactttaaattattttaacatttatgtatttttccaaataaatgtatttttaactcaaaagcaaaaagcagtacatgtgcactagaaaaaaaaaaaaaaggacaagcaataaaagaacttatataaaggacatcataatcttgcctactcagagagggccactctcaatcagtgccttgaggtataattgttgaaaccctttccatcttatccaggtatctgtgtctatatagtttttgtttatgtacaaaaatttagaattgtattcttttttttttgagacagagttttgctcttgttgcccaggctggagtgcagtggcgcgttctcggctcactgcagcctctgcctcccaggttcaagcgattctcctgcctcaggctcccgagtagccgagattacaggcacctgccactgcgcccagctattgttttgtatttttagtagagacggggtttcaccatgttggccaggctggtctcaaactcctgacctcaggcaatcccgcctgcctcagcctcccaaagtgctgggattacaggggtaggccaccacccctcgcccagcggattacattcttaacatatgtactgttttgcttttaacttagtatctgacacatagctttagagactgcataggaagccatcatatagctgtattatattttattaaacttggacatttgtgttgaacattgtaggtttttccagctttttgctattacaaacagaaaggaggcaacgtgcagttgttaagaacacaaactctggagttaaatggcatggtttctctgcagaaaagggtgaatgtagcaggtctgggactgctgtccttagaaaggctgcttccaaggttggcacttggctcgtgtcagggaacttggatttcggaagggttcctgccaccctaattggtaagagtggctcactgcataaactgtgcaaacactgtagtttatgctgaactcctgttttccttccaggagcctatgtgatcgcctggtaaaaaccctggatgctaagtctctagtgaatttccctggcagacatttcacacgtgttgtcacagctcattgctggaagaattaagcacaccctgaatgactacactggggggaaattcatggaagcttgcacctagtttcctctggacttggtcttgtagaccttttcccttttctttgtatccttttgctgtcatatatcatagctctgagtgcaactgtgtgctgagtcttgtgagtcctttcagagaatcaccaaaccttggggtggacttggggacacaggtttaaatcctggctctgctgctttctagcggagtaaacttaggcaagttactcaccctctcagtcattttctaatctttaatttgagttaaaaaaacagttttgttttataaatcgaaatatataatgtacttagaatagtgcctggcatgtaattatttctcaacaaatgttaagaattatcttgcaagctagatgtttgtgtatatttgtaactatttcttttcttctttttttttctgagatggagtctcactctgtctcccaggctggagtgcagaggtgcgatctcggctcactgcaagctccgcctcccgggttcacaccattatcctgcctcagcctcccgagtagctgggactacaggcgcccgccaccacgcccggctaatttttttgtattttttttttagtatagtagagacagggtttcaccgttttagtccggatggtctcgatctcctgacctggtgatctgcccgcctcagcctcctaaagtgctgggattacaggcgtgagccactgtgcccggccttttttctttttttttttgggacggagtctcagctcatcacaacctttgcctcacaggttcaagtgattttttctgcctcagcctcccaagtagctgggatcatccctgcactttgggaggccgaggcgggcagatcacctgaggtcgggagttcgagactagcctgaccaacatggagaaatcccgtctctactaaaaatactaaattagccaggtgtggtggtgcatgcctgtaatcccagctactcgggaggctgaggcaggagaatcgcttgaactcgggaggcggaggttgcagtgagccgagatcgcaccactgcactccaacctgggcaacgagtgaaactctgtctcaaaaaaaaaaaaaagtgctgggattacaggtttgagccaccgtgactggcctgtaactatttctttcaaataaatttctgtaagaataactgctgagcttaaggatatgtactttttttaatgtgttctggtcatagtagtaaaatatatttattaagacagatatttggtatagaaaaaaagtctttcctaattctatatttcagatatagttatttctaataatttgctatatacatgtcaaaatttatttctacacatattaatatggacagtagaatatagaaatttttaataaaaatgggaccacatatatattattttattgtttatgcctgtatataagggatctttatattcagtgaagttccataaaaacctttttgtcttccttaaaacgcttagattataggtgaagtaaaaaatatgtaattataatgtccaagttgtcaacttagttatacctttacatttgaaattacacattatagaaatacagtaatttagaaattacagacagtccctgacttatgatggtttgacttaggattttttgactttgtgatggtacaaaagctatactgtacttcaaattttgaattttgatcttttaccaggctagtgatatgtggagctacacttttttgtgatgctgggcagtggttgtgagccgcagctcctagtcagccctgcaatcatgggggtaaaccttcaacagtactgcgttgtcagcatttttttgaatattgtttgccagcatttttgcatccatcctgtctacaaagcccatctcgacttagaatattttcagtttacaatgggttattgggacgtaacccatcataagttgaggagtgtctgtacactgttgctttttttatagtcatcacaggcgtctttgacatgtcaccctgtcaccatgatcatcagagccacttttaaggtttacatcagatacacagcacatcagcttcacttccgcgtgttgcttgattccactggactctttgattccacaggaaattttatcctgttcatataacattcaggcagttggtttttcatttgcccaggatgtgtgactgccacaacctgactgatccctgaactgctttttaaaattatccatggctgggcatggtggctcatgcctgtaatcccagcactttgggaggccaactcaggtggatcacctgaggtcaggagttcgagaccagcctgaccaacatggtgaaaccctgtctctacttaaaatagaaaaattagctgggcatggtggcaggcgcctgtaatcccagctacttgggaggctgaggcaggagaatcgcttgaacccgggaggctcttgtctttgacatgctagttctgtgggagaaaccccagctgggcctggtggctcatgcctgtaatcccagctactcgggaggcagagggaggtggatcacttgaggtcaggagtttgagaccagcctgaccaacatggtgaaaccccatctctacaaaaataaaaaaattagccaggcatggtagcatgcacctgtaatcccagctacttgggaggctgaggcacgaaaatcacttaaacccaggaggcggagattgcagtgagctgagatcacgctattgcactccagcctgggcaacagagcaaaactgtctcaaaaaataaaataaaataaaataatacaagcattgacaggtacagaagtaccatgagggagacagcattgaattctgtctgagatgtgcaggcagaccaaaggggggtgataacagagcaagaatttaaaagatgatatatattactctgcttcagctgccataaccaattgcacagactggatggcttaaacagcagaaatttatttctcggagtgttggaggctggaagcctgagttcagagtgccagcatggctgggttctggtgaggagtcttcttggcttatacatgccaccatctcactgtgacctcacataacagaaagagagagagagaaagatctcttcctcttctttttttatttttatttgttttattttgttttgttttttgagatggagtcttgctctgttgccaggctggagtacaatggtgcgatctcggctcactgcaacctctgcctcccgggttcaagcgattctcctgcctcagctgagaaggtgggactagaggcacgtgccaccacgcctagctaatttttgtatttttggtagagatggggtttcaccatgttggccagatggtcttgatctcttgacctcgtgatctgcctgcctcagcctcccaaagtgctgggattacaggcgtgagcctccgccagcctcttcctcttcttataaggccacctatcctgctagattagggccccccacccttatgacctcatttaaccttaattacctcctaaaggccctgtctccaaatactatcacattgtggggggtagggcttcaacatgaatttaggaaggacacaactcagttcacagcagatgaataagcatttgccaggcagctcagttatggacgaggtgttgaaaccgacggaatatagcagatatgaaagcatagaggcctgaaacaatagggtgtgttcagggagctacagctggctcaacattgctgtaatataagttgggagggagaacttctgaaagctgaggctagaacaataggggtggaggtggagcacatgattatgaaggaccttggtatactaagcttagaaggacttcatcttaagggtagaggggagccacaggaacttctaggcagaggcatggcgcagtcagatttgcatttttgataattcaggtggaggagcaatttaagtagcagcgaaagtggaagtagtaagttagttgggaagctaatgcagtagcccttgtgaagcaaagatgcagcaaagacaagagaggcaaagtctggaaaatgttaaggtgatgaaatgtgcaggacttgactagatattttaaatgtgggaggtgagagagccataggagtccaggttgggttggggtcttacttgtccagtttccataaagagacatgttaattacttgacattttacagaattagtatattgactcattgatttccaaaactctttgaataagtatgtaactgttctgtagattgaagttgtgtcactcttaccatgatcacaaactcaggctctgcctatcattttggaactatttggggaagtcgaccatcttttctgggctagttacctttttaaaaggggagggagttgcacttggtgtcatatgcatttctgctctaacattgtttcctgctatttattttccttagtatatttgcttgtacatgctcagtattgtgctgtgttttatagattacagaaataaaactgtgactcttgtctttgacacgctagttttgtggcagaaaccaactcatggtactatactaccactaaaaagaagtaatgtgtatttaagggctaatttgtgtctgctgcctgcagcctatacattggttcattcatttgttttcattcatttgttccgagtctctgtgtttataaagtttacactctagtggaggaacaataattagtaaacatgtagtatatggaatggtgatcagtgtcacagaggccagcaaagtaggagagggtgtgtgctgagggtctggcttactatttaatgtggtgcgatgagagaagcccccttagtagggtgacatttgagcaaaggcccagggagtgagagagggtgagacataaggtctatgcagtgtaggtgtcgggaggaagaatgttgcaggcagagggaacaccaagtgcaaaggccctgagatgggaacatgccccgcttatttgaggaacagtgaggaggccggtgtagcaacagcaatgtgagaaggggaaggtgagttcactgatgggggaagaggaggattattcagggccttggaggccattgtaagggctttgactttccctccaagtgagacagaaagacactggagcgttgcaagtgggggtgtgacatgatttgacctaggctttagaagcatcactctcactgtatgtgcagaatggactataaagaggcaagggcaggagaagtgagactggttaggaggcagttgcagtaatcctggcaggagatgacagcggcttggatcgggggtagcagtggaggaggtgagaagtgctgagatgtagggctatttatgatacacatactgacaggcgttgttgagggacgagatgtggcatgtgaaaggagtcgaggtttctggcctgagtcactggaagaacggaactgccacttatggagatggagaggactattaaaaaacctaagtggaggtgtcaagagaaggtgtcaagaaggtagttggacaaatgagtctggagttagaagagggaaccagcctggagatatgtagatggtatttgaaagccacaagttggtaaatcaaagaccaagagagtatataggaaagaggtctgttggctgagctttagtgcccagggtgggtcaagatgaggaggaaccaacaaaggggactgggaagaggcttctaggggagtgagcagaaaactaggagagggtagcatcctggaaccaagtgaacacactgtttggaggcgttaggagtaatcagtggtgtcctacgatgttgatgcgtgacacctgagaatggaccgtagtgttcaagtgatgcacgagatagaaccagtcataccactaatggtttttttagtcctaaatatttttactgcaagatttcgttgttctaagtgttttcactgtcagatgaaggatgaaagtcgttcagggtaatttccattttagtaatttccgacagcggcagaacagtttctacttacgattggtatgcatttttattattagccatagtattcattttgggtgagtacgtctttgttagcgttatttttcttcaccacctcctcgagttgttcatccattcattcattcacccaaagaaatgcttattaagcgcctgtcctgcgctagtcctaggtttctcttgtcctgataggtctagcttcacacgagcaggattttgcctttccggcggcactaggcttccgcctcaccgcagtggggtttttccagcctaccttgtgcagctgcggttctcagcatccgcgggcggaggcctgcagccggtcagccggtgcgtcccgcccacggcgcggggccttctggcagccaagaaggaaatacagatgaggtgggcggacagtatgcagatgacgggggcgggccgcgcctggcgggcggtgtgcagttgaggtggtccggcaggatgcagatgaagggggcgggccgcgagggcgggcttgatgcagatgagggggcggggcccacgggcgcgggagagcagcggctccgccggcagctgctgggaactggaaggcgcccggtcctttctttgactggagcggacccgccggacgcaaccgcctcgccagccggagccagcgcgagctcggcacggtggacacccggtccgaggccggcaagccggctggtgcccgagtcggccaagcatgggcaaccactcaggacggcccgaggatccggaaccaggtctgtgcggctggcgggggtcgcgccgcagccgcaaccccaccccccctccaggcgcccttcccccaccgcctccggctcgcggcgccgactggggcgagcgaaaggctaaggtcctggggtgtgattcttgtcgttggaatgcgccgcttgggattgtgaaattacctgtgccgacgccgcgaccagaaaacgctgctcgtcctgaacgcgcacctgggcgccggggccgccgggcaggcaccgctgggtccctgccgcggggttccccactccgcgcctggcctgcgcctagaccaggtctcctgagcgcgcaggccgccctcggactttccgggcgtttgcggggagggcgtgccccgcggcctctccctgtcggccgccggccccgcagtttgtggcgcccgcggctctgcccctcacactcacgccagggctgccccgcgactgttcctaacccagaatagtccgtgcttgttctggggtgtcgggcgcgcctctggttatcccgtttttacttcctcagtcctgagtgagcttcgtggagtcagttgggccgtagttttcgtcctctggtagctcatgtcggcccccagcagagttagatgccgataagcagggttgcttttaaaaacaaaacgaaacatttctggactgtcacgtgaagcaaaagggatttagttttgcctgaaaaatggcatcttggctgataggaaagaggtggttgacctgactctggagtccttgtgggggtggggggccggtgacaggtatgtgtttctgtgggagagtcagaactgtaaatattttccaaaggcgtaatatttgaattttaatttgaatgaggactttgaggctctgagaggtgaagcgacttgtccgagtgaccttttccggagctgggtgccgtgctgtaggacgctgggtcgtcctggcctctgcgcattgcttctccttcatctcccagcgccccagccgccccaccttggccctatcctcggggtggggtggaggcgggtgcctccctgacacttggggtacattggactggtaccacagccaggatggaaaacttggacgggctgtccaagtttcttcacaggaatactatgaagaaaaatttcaggggccagcttactgcctagaggtgactttagttacacagcacttgttcagactattttttgggcagaataaccaacaataagcatattcataaaatgaaatatgcataaaataaaaataatatacttgttataaataaccctgttggtaaaggattggttcggtaaaggattggtaacattttaaaaacacttctcattagttacatgcttgtccaggtattgtgaaaacccctgtgtattatttcctttgtgttaaaattgtgaaaagagttactcttgttacagcttttaagactgattggatgcctgtgttccaatttttttagtgaccttactttttaaagcactgtgatggataggacataaaaagaatatgtttatgccagtgacttattttattgtatttttcaaagaatgcatatcatttcagaatgggaactctgatttgctgcaaatgaagataccggatttagggcatttttaagagatggtgtctcactatgttgcccagactggccttgaagtcttgggctccagcacctctcctccgtcagcctcccaagtagctgagactacagacaaatgccaccttgcctggctagaaattcgtggtaaaaactttaaatgctggattactgtctgaaagtgtaattttaactggccttctaatgctgtgatgaaatgctgtagagttcatcactgagatcctggaaattagagctttgttaaagatgcgtgggttttcagtcggctttaccacagggactgggatgaggtcgcatggccccaactggcagttgtggtacattggactagaatctcaacaagtgcttccgagggtcatcagagcaaggggaccaaaaggatataagggggaagcagaaggagaagggaggctggatgagtgatagcagcacacaagcctgagtgtcgcatggttcccgtattgtgtcagttttgtccatggagaacagacatttagaattaagaatgtatccaagacagacaatagggataggaagcagaattagaggagttcgagaccagcctgggcaaggaaagcttttgatcatgatgcagacccaacacctatgaaagggaagcgggaggcagcaggtttgggcagggagagcctcagataatgatgcagacctgaagtcttggccacttgatgggggagctccctagcaaagcccacccattagaggggtctcaggttgggcagaaaggacagtccctagtctttctgtgggtcagtcattggccagaggctactttggaagaacgtgccttcagctcagaagctaacacaagtcttgggatcctcgtggtgccaacagctggaagctgtcagccctctgcagtccttgcagatgaatggcaagttcggttttttttgttctgttttgttttttgagacaaggtctgactgtcacctggggtggagtgcagtgctgtgatcatggctcactgcagccttgaccttccaagctcaggcaatccttccacttcagccacccaagtagctaggacaacaggcccggctgtttcgtttttgttttgtttttttttgtagagatgggattttgtttttgtttttgtttttttttttgagatggaggcttgttctgccacccaggctagagtgcagtggtgtgatcttggctcactgcaacctctgcctcctgggttaaagcgatcctcccgagtagctgagactgcaggtgtgcaccactatgcccgcctaatttttgtatttttagtagaggtgggatttcaccatgttggccaggctggtcttgaactcctgacctcaagtgatctgcctgactcagcctcccacagtgctgggatcacaggtgtgagccaccatgcctggcgtagagatgggatcttgccatgttgcccaggctggtcccaaactcctgggctcaggtgatcctcttgcttcagcctcccaaagtgctgggattacaggtgtaagccactgtacctggttaagttctttcttgaaaaagggatcccagtggaacacctccatggttgactgccacaggacctcagttgcttggacagggagagtctctttaaagagtaaagaggtaaaatccccatctgagacccgctgtaggcgttgagattgcaccatcttttccagatggaagctcctcatcccctctggggtgtttctaaggcagaaggcagcttctcagctgctgctgcttttctagccctggaattggctgtggtggcagcaggattcctctgttgtggtatctgcagtcctccgagttgggacatcatgacttaacatggtattgcagaatggataagataaatagatccagtaaaagatatgaaaatttcatgtctgaaattttcagcctgggcagagaaagttggtgaccacatctcatgcttcctaaaaggtcctagttaacagtccttcagtttccaaccaggttgtcatcacctcattgtcagggctgctgggcatggttgtgcaatttgtgtactgttcaaaggcatctgcttagagagttgagtgggcctggcagggttgtagcaacccagaggaaggggtgccgttttgcaattttgcctttttatattcacacaaaggtgcccaaagtgttaaagaagtcttagaaagtgagtttagaaggttttccctagtcccagtaccagcttattatttgttttaaatttgcatgtatgaaattaaaaagttaatgcaaattacatgaaataaaagctgctcaggtgcactctgtattagttatagttaatgctaactgtggttacagataaattccaaaatagccacttaagacagttaaagttgattgctgcctcatgtcgcatctggtgtgagttgggggccatcagcaggtggttgttagagactcaggctggtggatgctcctcttcagcatatggctcccaaattgccctgaatctgccagcagtcgggagaggagaaggcgtgtggaggaccctgcccgaggttttaggggccaggcctagaagtggtgcacattatttctacttatgttccactggccagactcagtcacagagacccactgacatgccaggggactgcatcaagcagagagcatgcatattggtaaacattagtgtctctttgtagacatgatgaccattctcaaccacatttgcatcagtattttattacaaaaattttaatcagaaaaattaagacttacatagtaaacacccatgtaccaaccacctagattctaaattaatattttgctgtatttgctttatttgtacatctctatattcattcctctacccacccattagtctgtcttattttttgatgcatttcaatgaaatggtagttacctctacaattctacatgatatactatacccttattgtttcttgatttgttagttttcaagcctctctactactaacctgcactatgaaagttgaggaattaagcacattttccctgctatatattctcctcactccccgtttctgcaagtcatacttaaattttccaaatccattgttagtataaaaatgctagtggtagaatacaagtagtggtatacagaagtttactgtaaaagtccttccactttgctatatgaaaatttcattttgagaccagcctggccaacatggtgaaaccccgtctctactaaaaatacaaaaattagtcgagtgcggtggtgggcacctgtaatccgagctacttgggaggctgaggcaggagaatcgcttgagcccgggaggcggaggttgcagtgagctgagatcgcgctactgcattccaacctgggtgacagagtaagagtgtctcaaaaaagaaaaaactttaaaattctaaggtaatctattgttttccacttctatttcttgactcaccagctttaaatagtgtcctaggcttcgtcacaggtaaatgaggatgtagtgcccctaaatgtcttctgccttattctcaagagtccccctcctgcacttattcccagtctgcctctggacctttcacatggctagaacattttcattctgttccataattagtattagtaagtcttctgtgcatcatttataggttaattctaaaaatggaaggcctatcagcatttaaaatatcaggatctcatgtattatttaatggagaaccaggtagtatgtttagatttatagagaagacagtggcatcttacattgcataacgcgtgatctgtgaagacaggaggaaggagtaaggagaatggaaaggagttggtatgaatatgctctttacttttaaaattaatatgcttttatcctgttactcagtttctgtcttttgcagactgtaagagggaatttcttttttcttaaaaacaagaagctagtctgccttttcatactcagttctgtcacttctttttttctttcttttttttttttttgagacagagtctcattctgttgcctaggctggagtgcagtggagtgatctcagctccctgcaacttctgcctcccaggttcaagagattctcctgcctcagcctcttgagtacctgggactacaggtgcgtgccaccatgcctggctaatttttgtatttttagtagagacggggtttcgccatgttggccaggctggtctccaattcctgacctcaggtgatccgcccacctgggcctcccaaattgctgggattacaggcatgagccaccgtgccctgctctcatttctgtcacttctgccctcagacttcgggcaaataattttttatttttttatatatatattttttagacagagtctcgctctgtcgtccaggctggagtgcagtggcacgatctcgcctcactgcaagctccacctcccgggttcacgccattctcctgcctcagcctcccaagtagctgggactacaggcacctgccactgcgcccggctaattttttctattttttagtagacacagggtttcaccgcgttagccaggctggtctccatctcctgacattgtgatccgcccaccttggacccccaaagtgctgggattacagacgtgagccaccgcgcccggcccaggcaaataatttttcctcgagcttcaaattctttatctaggaaagggaagagtaatataacctacattgtaggattgttgtggtgattcataggttaaaacatatgaaggcttaaaatagacacacatagaaagcacctgataagttttagctgttaattcttcttaaccctccaacataatactttggtttggactggttgctttctagtcccatctcattctcaggttagttcattatttcttggatcctttttctcttttttggattctctttgcttttgtaaaagtgaagatgtggctgggtgcagtggctcacgcctgtaatcgcagcactttgggaggccaaggtgggcggatcacccgaagttgggagttcgagaccagcctgaccaacatggagaagccttgtctctactgaaaaatacaaaattagccaggcatggtggcacatgcctgtaatcccagctacttgggaggctgaggcaggagagtcccttgaacctgggaggcggaggttgcggtgagccaagattgcaccattgcactccagcttgggcaacaagagcaaaactccatctcaaaaacaaaaaacaaagtgaagatgcatacatcaaatatcaatggtaatacatagtaaaaaatctaagaaggtcaaatatatgttactgtaataaatgtcagtgggttaagctccccattaaagagcttcccctaattaagacagaaaatcaaatatatatactgcagaaaagcttgtttatacgttactttgatttttaaaattaagtcatttaaagttgtggataataaaaaagtagctcttgaaattttcaagttcaacgtcttgttattccatatgttctatttacaaatgcagtaaaatttaataagcactctttaagagcatctggttaaattgagttctgtttacaaactttgctaataaaattaacattttaatttgtgtttattaatttagtatatttaggttcttgttaaagtctgacaaaaaaatccagtttttaaagtcttataaatttaataattattctaataaacttagtgattcttaagtcctcttatatattccaaaacatttatattctctctctctcttttttttttttttgagacagtttctgtctctgtcacacaggctggagtgcagtggcagggtcagagcttactgcagccttgacctcctgggtgcaggcggtcctctcactgcagcctcccgagtagctacgactacaggagcatgtcaccacccctggctaatttttgtgttttttatagagacggggtcttgctatattgccctggctggtcttgaactcctgggctcaagctatcctcccaccttggcctcccaaagtgctgagattttataggtgtgagccacagtgcccagcctgtattctctctttatatgtgtgtatatgtagatgcaagctttccaatttaaaattacaaattaattactcagttacatattttgaattggaatcgcaaggttgaccctgtaactctttaatagatccaattctcataaacattaaaagtataattctataatgcagatatttcttaatatggaattctattactacttgtctgattcttttgattatttccccacttgttctaaatctttctaggattaaaagatgtttacataagtgttttattccaaataatattgggatttcttcccatgtaatttttttttttttttttttaaagagacaaagtcttgctctgttggccaggctggagtgcagtggtgcgatgctggcccactgcagccttgaccttcctctctgccccagcctcctgaagtagctgggactacaggcagtgccaccatgcccagctaattaaaaaaaattttttttttggtgcagacggggtctcactgtgttgcccaggctagtctccagctcctggcctcaagcggtcctctcacctaagcctcccaaagtgttgacatttgccaccatgcctggccccatataatttttggggttgtcttctcagtttgctgaggttttttttaataaacagagatctctgacagggacaaggttgggattcttaccctacccagacttcagatatcagcttgagcaacttttgctttggttggaacatattctttaacatatttggtttgagcatattcagggatattctgtgcttgttagttttctcaaccttcatctgaggataatgttttgcccttaccctttatatactttgcccgggtatagaattcttgttcaccacctttgtaatctttctgtagcatggacttcaaaacttgaagaaagaggtgtcataatactcatgtgccttagattcaaattacatttaatttgtgtagcttctaatagcctgagacccccattcgaacggccatatcacctgattagagtttacacttctttagcacttaaaatatataaatattttcccatttaactccaaagaactttgacttgatagaatactgcctggtttttttatactttctgtctcttaaagcagtatcttttttaaaaaaattaattttattttaagttaaatttattttaaaaagttaaatttattttaaggatacacgtgcatgacatgcaggtttgttacataagtaaacgtgtgccatggtggtttgctgcacagatcaacccgtcacctaggtattaaagccccacgtgcattagctgtttatcctgatgctgtccctcctactacccccgccctgacaggccccagtgtgtgttgttccccccaccccctgtgccgtttccatgtgttctcattgttaagcttccatttataagcaagaacatgcagtgtttggttttctgttcctgtgttagtttgctgaggataatggcttccagctccatccgtgtccctgcagagggcatgatcttgttcctttttatggctgcattctgttccatggtgtatatgtaccacattttctttatccactctgtcattgatggacatttggattgattccatgtctttgctattgtgaaaaatgctgcagtgaacatacaggtacatgtatctttataacagaatgatttatattcctttgggtatatattcagtaatggaattgctgagtcaaatggcatttctggttctaggtctttgaggaatcgctgcactgtcttccacaatggttgaactaatttgcattcccaccaacagtgtatttctccacagcctcaccagcgtctgttgtttcttgactttttgataatcgtcattctgactggcatgagatggtatgtcattgtggttttgatgtgcatttttctaataatcagtgatgttgaactatttttcatacgtttgttggctgcataaatattttctttagaaaagtacctgttgatgtcctttgcccactttttaatgggttttttttttcttgtaaatttgtttaagttccttgtagattctggatattagacttttgtcagatggatagcttgcaaaaatgttctcccattctgtaggtagcagtatccttcttgacagttaaaacaaaatgtgatttaattgtggatatctttcttggctttgtctatcttacaagataattctactgaaacaatagtatcagttaaaaacacaatacaccacagagtgtcttaaatgagataggaccttttatattgataaaagtacaattcaagaataaaaagtagcagttacaaagtccactcactaaatagcaaaacactggaaataactaaagcaaaacctatttgaaacacatggaaaaactcacaagtaaagtgggagaatttaactgtcttacacaaaccattttttcaaaattatcatggaatggttaatatattgatctattctaaggccaggaagaaaacgtcattactgttgttcaagggaaattttactggtcactctgtgatcgtaatgcaataaaactgtaaataatgaaagttgacattttaaaaacttattctatttggaaattttgagtcaaataggaattgaaaactacaattatagatcatttagaaaaataattatgaaatactaataaagttacaaataataagcaaatttattcctctgaaaacttttattatcaaaaaataaagaatgaaaattaagttctacacaaaggacattcaaaagaaaagaaacaacaaaagaaatctgggataaccggagggagtttttaaaaacggcagacattaatgaagtaagttacgactgtgtctgtttcactcttctctttcctcagtacctagcccagccttgtccctgtcagagatctctgtttattaaaaaaacctcagcaaactgagaagacaaccccaaaaattatatgggaccaggcatggtggcaaatgtcaacactttgggaggctgaggtgagaggaccgcttgaggccaggagttggagactagcctgggcaacacagtgagacaccatctgtacaaaaaaaaatttttttaattagctgggcatggtggcactgcttgtagtcccagctactcaggaggctggggcagaaaaagcctaagagtatgttctttgttaaacaaatgaagtaaagttttagttagactcatcaagaaataggataacacaaataccccaaattagctatatatatgtaatgtgtatatatatattatattatatataatttatattatatatagtgtatgtaatatgttagctacatatatgtgtttatatatatactatatatataatgtatataatcaggaatgttggatattttttaaaaactagaataaaaaatagaaaatcttgatgaaattaggaaaacaaaattaccaaaatcaattcataaagaaatgaaacacttggacagaaaaatattcttggaagatgtcacaaagtgacttaagaaaatagctcccagctgggcgcagtggctcacggcctgtaatcctagcactttgggaggccgagatgggcggatcaccaaagtcaggagttcgagaccagcctgaccatcatggagaaaccctatctctactaaaaacacaaaattagacgggcatagtggtgcatgcctgtaatcccaattactcgggaggctgaggcaggagaatcacttgaacccaggaggtggaggttgcagtgagctgagattgtgccattgcactccagcctgggcaacttgagtgaaactacgtctcaaaaacaaaaagaaaatacctcctcaaataatcctgaatccagatggtgttataggtaaagtttttcatatatgagaaaaatgtaatttctgtgctatttaaagttatgtggtatgtttcccaaagatattggatattacatattacagaggatataataagatatgtacagatgattatttcttaatttaataattaacatatgctagaaaaactataacttgtacatttaatctatgtctgttgcttaggatcaggttaagtcaaagaagaaattagtcaatattaagtttatgcagaaaaatattaaacacataagacagctgaatgcaaatatagccaaaattatgaaggtgatattcaaataatagaaacttgaaaaatattccaaagtacagaaaagatggaaagcattccgatttgttttgataaaagtagtactaatactgttaatactgtttctgataccaaagcttttcaaagatggtatgaacaaagaaagccacagtatattcttactaatgtagatgctctccttaactgacatatcagccacatttaatccaaccatgcatttaaaaaaacattacaccattggctaaaaagtggcttattctaagaatgcaaaaatattattatataaatagaattggaaatatcagtacatttaaagataaaaattaacatcatactgtatgtcagtaatgcatttaataaaatttaacatctacctcataaacatttaattcctgttggaatagtctggatcttttctgaagataaataaaatgctctaaaagcagcacataccatgcttaacaggaaactaaaaacatccccataaaggtcagggacaaaacagtggtgcccatacaagactgtatgacactgttttcaaatatactagccaaaccagtaagattttaaaaaaatggttattaaaaaatgagaaaaaattagcattatttgtagatactagaattctcttgttagaataaccaaggagatcaactgaaaaagcatgagaacttatggcaatttagtaaggtaaccagcttggaaatgagtatataaattcagatatatatgtgtgtgcttgtatgcttgaatgattcagatatgtatgtgtatgcttatatgatgtagatgtatatgtaacagtagttttatgttagtaatcagaaacgatggtatattttattttatttttttgaggcagggtcttgctctgtcatccaggctggagtacagtggtgctatctgggctcactgcaacctgtgccttccaggcccaggcaatccttccacctcagcttcctgagtaactgggactacaggcatgcgctaccacacccagctaatttttgtattttttgtagagacggggtttcactatgttgcccaggctggtcttgaactcctgagctcaagtgagccacccacctcagcctctcaaagtactgagattataggcgtgagccactctggccacaatggtttgttaaaaggtttcattcacactatgaacaaaatgtataaaacctgaggaagaaataagaagtgtgcaaggcctctgtgggagctataaactatctactcaggggcatagatacaaactatctcctcagaggcactggtgttgatgtggtaggtgtcctccattaagtggaggaattatcattatatattatagttctgaaaatcagaaatagctgctgaattttccaaaatgccttttgggcattcacacagatctatttttctttttagatagaatgatttgatggatttaaatatcttcaccttacaataaactgtgtcaggtttttctaaatcttccttttggaatttttttttttttaacatgaaaggtgaattaacagcattaatttttcttggtcccttattgcgttatatataaaataagggtatgtgtgcatggttagttctaaagttcctgataattttaacattctgtgatcttatggttttagacattttttcccaagagacaggggcttgctctgttgttcaggctggtctcgaactcctggcctcaagggatcctcctgccctggcctcccaaaatgctggtgtaacaggcatgagccaccgctcatggccagacttttaaacatttctaactcagagaagtgtttggattttacctcttgaatgtgttgcgccaatttgctttaggtacgggatttctagtttgttgaattctattttacttacaaaaattttttatatggctccaatcagatcaaaccagcctatgtagtatcatagaagtaacattaaaatattgagaattttgaagggttccaggtatcctgaagactttaccgtcacaggacaaaaacacttatagggctgtccttccaccagacccagcctctgctgttccattgcccttgctgccctcctccgtccagtttgtccgctaccttcttgcttagccaggatgtgtgttgtttggcatctgccttcacatggacattgtgctgcagttggttgcttctccagctaagtaagaactgtctgaggatccatgtttatctttgccatctccatggtctccaacactctgcagagtccttagcaaaatgtatggttttaatgaattgatggcagctgtcccttgtatttccaggaaagttttgaattctcaggagaaagtaggtttgatatttcaaaacgaatgtggttggccaaatgttttatattgggattaaagaaattattttagtaccacaaacttccagaaagcttgtccataagagtttttcctcaccccacaccactacaaaagtgacccagaaatcctgagccagtggaactcccaggggggtgcaggtatcactgggaccttgcccaccctactgtctcctttcatccctgtcccagagacctaacatcaccatggtctcctttccctcagtctttcataagtatttgtaaatactcttttaccaatatcattctttctctgttatttttcctttttaactgttgctcttttacttcagaaaaatttttcttttttcttttatgctcccctcatttccaacttcctgttccaaattaagcctaattatggttgagtgttaagattacggtttatgataaacctagaaagataaagtaatacatttttatgtgaaactatatctagtaaagaactggtaccaaccacctccaaagcccttgaaaatcccctttgttttatctgccagagaattcatctctttctctaattggtcctgcttttctctctagcacaagcagccaaattttaaaaaaatcttggaaggttacattataagcagtctaaccttttgatctgtaagcagataaacagagtctattcatagtggtaaaaaactgttatgaaaattatctgtttatagttatattttggcctcttttgctctcccctcagtcgtatgttatagtatgctgaagatacatggaattaatatacttccaaactggaccaaaaatgtcatataacagcctgtatttgcaggttaacaaagtatgagtgagaggggtatgtggctctgagtgctttgtttgcctgtttgtatttgtgtttctgtgttcctcctgcacaacttccctgacagcctgtgctttatgctttcatagggattttgaatcataagggaaagaagaaagattgcaaatcaagagataccagtaatcagatcaatgatgaaattttagtgtaaactatacattaaaatgacttcttctgtaaattttggtatccagaaccttatgctaaccctttcagatagaaaacagggcttgaagtatcacaaacatgcctttttcatttactgtttttttcattacttaggttattcctatttttttttgagacagagtcttgcgttgtcacccaggctggagagcagtggtgcaatcatggctcactgcagcctcgacctcccaggctcaagtgatcctcctgcctcaacctctcgggtagctaggaccacagacgtgtgccacctcacttggctaatttttttaaatttttagtagaggtagggtcttgctgtattgctcaggctggtctcatccctattaatgtgaattctggtaccagctttgactctggagatgctctggggcttcttgatggctgtggtcagcccacaccatggtcatgtgcttgccagcattctggtcattcctctcttatctgctgcctctaatctgttcctgtgtgcctggagactggtagccaaacctgccagaactgtatacagaccagaagtgcttctcctagtagtatgcaggtgtggagtttagggcacagtcattttgagcttctctggagctctcttccttttcccgctgatgacattatctcaggtagctgagtggccatagaactgagtcttagataaagtgtcactgcacaagcatgtggtcaggtgctgttcccctgccctggcacctgtggaaggtgtgtgggcctcctttctgttgctttcttgtaccacaccacaccccttctggcctcagggctcctgcatgggcttctctgtgcctggatgctcctctctcagcgtgttacagctgatcctccatgggttgactgcaaggcccagtttgcacaggatacttccagttaacacctgattgtggatcagtttactcctgttatttttactctcaaaaagtgccccaatttggaagataaaatatactgtctcctacttaaccatttcaggtctcagtccagtgtcacctcttcaggtagacctttccctttctctctcagggggcaagtctcctggtttgctgtgactgcagaataaaccccagggcttggttgggctgagccagggtttgccagcagacaaattcaggcttctttctatgtgagggcccatggcaggccagcgtgggaggacgtgagatgggaggggcagccaggtgctgggagggttgggagagacatggggaggaagagtgaggactgaagccagggggaagaaacatggaagtgtgctgtaagctctgtgcccactagcccttgatgagttttaatctgctttacccctcaaggctgtaagagtcagatctgagtgttttgaaaatgagacggtgtgtgcgattaacttgaagagaactgatacaggagagatctttggtgaggcctgattataagtggatgacaagcttcatttttcctaggtgataggttggactgttagacaaaactttggattcagagaaaaggcactctaggtgcattttgcctcctttctttaccttgatggattttcatgttggtcaaatgaagacttgggctacatctatgaaatcccttccaatttttagaagtatataattctgttgtacgctctagtgagtccagactataaagcattttgaattttactatttcttttcccctaattgtgggccagaaaggaaaatttccaaataaggatgcacagtccactctgggaaacacagggaaacaataactagaatacaagtctagcctttgccctggcatgaaaagaatgcagactgttagctgacctaaaggtttctgttttatttcacgtttaggtgaaatggtcagctttgaccattactcccaaagaagtttctctccagactttaagatatttgtgcaacattaagatggttttattatctgtgagacagctgtggtcacttttatttatcaaagtgccatgtttattgtatatgtatcaggagcagtgctggaaagctaaatttagagaaataaacctgggctcacaaatgattatggtgacattcagtatacccccaatgacactatcactataacattgctaggtcgcctcccagcagtctagccatctcaaccataaaggaatggcgaagtaatgatggcaacttgccttattggagagtgtgtagactgccgttttaaactgtaattgtcaggattagacctcaaccgtggtgaaatgttgggcataaaggtacatgaacaaagctaagtgcaaagttgtgtgaatgctgattcagtctttgtgaaagtacagtccacaggacacaaattggcaaaattcatttgccttacagtgtttaaagttttttgaattataacattttgggcctgagttctccacttgctgcagtttctgccagcccctttgttctttacttggctcttgcaaacatttatttacctatttagctctatagacagttgaagtttttggtgttttttttttttgtttttgtggagacggagttttgcttttgttgcccatgctggagtgcagtggtgtgatctcggctcactgcaatctccacctcccaggttcaagcgatcctcctgctcaacctcccaagtagctgggattacaggcatgtgccaccacatttggctaatttggtatttttagtagagacagggtttcaccacgttggtcaggctggttttgaactcctgacctcaattgatccacctgcctcagcctccaaaagtgctgtttacatgcctaagccactacacctggctggcagttgaagttttgacccctgtttaaaaaaagaaaagactattataatactggaatttaaattacaataaaggtgatttttaaataaaataaattttaaaaattaaattgatatactgtaaatatgcagttaggagataattgatcttcctggttacttcccagggaagcaggactcaagacccagatttgtgtgcagagtttatgggggttgcttctgggaacagtaccaatgagggggtgagggaagccggttgggcagagggagaagctaagatggatgcagctgcgatagctgcctcttcagtcccaggggattgagctggaatgggccttcaccgtgtcccaaatggagaccaggtggtcacatcagtctctcccccccatcagtcttggaggggagtctgcagagaatctgtttctttgccttttccagcagtcttgcccttcatttcctttatacatctcaaacactcaccgagtattttcttctttcaaaagtttattctcggggaggtggctccctggctgaccacaggtcccgccggcattcagcctggctgactcaggaggtcagcgcctagacctgactcattttcttccgctccttgccgacctcaccagggcctgcttcctggcacctcatttgaccaagccctctgccttggtcaaaatgaccaaggcaaaattttggtcaaaattttttgaaatgttagtttcaaaaaaaatcttaacctcctctttgcctgtggtgggtgggcaggccaggtcaggctcaccctgcagtgtggagggtggggtcagaggcccctggacagcctggggccgcctctgtgctccgcagctcagttttggcgggagagccctggccagttgtcaagaaagtgcgcctctgtttctggggtaatgctgtgggcccaggaccttcagcctgcagcccccagaggggatgtagtcatgccaaagctcctgatgccatcatcatcacgttagaacccctcaccaccacctccactcataagtcatttgccctaagccagcacagcacttcgaattcaggcagttgatcatcatctaagcgtgaataccattttattaatttttgcctagaaattggcactccctttaaaatcttttaatgcttttgtttactgcaagttttcttccattactttttcttctgtgtgtgccctctcctggctctctggctttcctgttatacttgtattggatcttttcagtcctctatgtctcttaaatttttaaaacttctattcatttcagtattcttagtcggtcttctcattcattgattggattttctgtagtgttcagtattgctagtgatcattattttgcaagtgacagcaatcttttctgatgtgacattttcccttttaacaaagatgtttttctttaaacatcttactgaaaattggttgactttctgaaggactattactacactggccttgctgggtatgtgggtacccatgactgttctgctcctggagattaagtactgggacttctgtagctcaggtccctagggggcctgggcctctgccgggtgggacagtgggctggatgcacatgtagggtaggctttagtgcagcattcctagtctgtgaacttctcctgtgtcatgccaagggatttgaatccaggtgtgaattcaactactcataaaagagaaccatactgacctatggcacattgagtagagagtattttttaaatgaattaggcctgatttaaactatattcagcccccttggcttatgtaaatgcgcaaatttctgcagattctctgcatagaagtttttttcttcatgctttctggagcgaaaattcttatcctggcttcctttatttactagctgtaggatcgcaggctagtttcttgcttgcttgctacattcccctcctgtgtaaaatggggctgttagtatttccttagggagttctttgaacaaagcccagaagttaataagttctcaatgaatgttaataaatgttaaataaattatcagaaaatgttagtttcaaaaaatcttaaccccttctctttttcttttgtcttctccgcctcgttttcctacttttcagtcattttacttgagggtaggcaacatttcatttctcaccaaatgcagacaggtgcttctccctacttccgtgtccctctccttctcccactacccttcttgccttctctaaggtattatttatgtagtcagggagtgtattggttcctgttgctgctataacaaataactacaaatttagtggattcaaaaacaatgcagaattatttcctggcagttctagaggttagaagtctaaagtcaaggtactggcagggctgtgttccttctggaggcttcaggggaatatcagtttccttgccttcccagcttctagaggccacaagcattcctcagcttgtggccccttcttccctcttcagagtatattgcttcaacctcttgggctgtcatcacatctcctttttccgtccctgattgtcttgcatccctgttgtaaaaccctggtgattatattgagcccagcagagaattcaggataatctctttatctcaatatccttaagcacatctgcaaaatccctttgttgtgtgacatactcacaggttctagggattaggatgtggacatatttgggggattgttattcagtgtgctgcaggaaggtagatgtgtaaaccttttatcatagcatagtgcaggtgggacttgcacagcggtaccctgagccaaaggtgtggacctcagacaaggaagcagttatttctgaggacattgggaaaagtttgatagaagagagatgtttgagctgagtcctaaaggatgaagaggccagggaagtttggaaggcttttaggctgaggaaacaacacttgctaagaaatagacttgtaaaaaaaatccagcaattttgaggaatagtgaaatctttgatgttgctaagacacagggtatattgaggagagtggtaggcaaagaaaattgtaggttaaaactagaatgtgctgtgataatgagcttctaatgtatcctgtaaagagaggggagccagtggagttgttttggtggcttttcaattataaatttttgtctgattgtgtaagtagttttcttcttctagaaaatgaagaaaccaaataaatagatcaagaaaataaaatcattcaaagccctgctactcagagataatgactgttgacatttctgtgtagtgtcattattgagccatttgtgtgtctgtttacccagttgaaacctcactgtatattaaatttcatatcttgaattctttagttaacggcatatcaacatttcttcatgtaattaaatactctcaactatccttaacatctccataatatcctattgtatatattaccataatttatttaatccttcattgttagattcaatatttttgtattttattttatttattattattttttgagacagagtctttctctgtcgcccaggctggagtgcagtggcgcgatctcggctcactgcaacctccgccttctgggtttaagcaattcttctgcctcagcctcccgagtagctgggcccacaggcatgtgccaccacgcccggctaatttttgtatttttactagagacggggtttcaccatgttggccagaatggtcttgaactcctgacctcgtgatccgcctgcctcggcctcccaaagtgctgggattaacaggcatgagccacctcacccagccatattttattttatttatttatttttgaggcagggtctgtcttgccctgtcacccaggctggggtgcagtggtacgatcactgctcactgcagccttgacttctcaggctcaagcaatcctcccacctcagcctccctagtagctgggactgcaggcatgagccaccactcccgactcctctctattttaaataatactaacacatagatctgtgtttaagtttttgaatgtttcctcagggcaggagtgcttctcctctgtttattctcttgagacgtgagatcaggtagaaatgttcccgtgtctaggtggaggagaccccagtgtgccctttcatttactcctgggctctagagtggaaacttctgtgtttttctctgtgtgatgatttgtgtgggtgccaagggccaaacccacatttagcaaagaaatagtgtgatccacttaaaagggggtttaataacttgagatggagatatcaagctgaacattcacaacaagcataactaaatcagagaggcagaagaaagcattaaccagaaaaataagtactaacttttaaagagtgattactcctgatttaaaacttttactagatgaaatacaaagggtaacagactgtgttgagaactgaattaattttctggaaggagtgtcttgtaaaacaaagatattgtgaggtgaaaaatgtaagatgcttaagggatctatgtaggagacctaataattgaatgataggattcttagaaggggacaaagtaacagatggaaaatacatcgtattataaaagaagaaacccatctgagctgaataaaatgttagacttcagattgaaaggactcatggaattcttttttaaaagacaattgctggactgcagcaataaagatagaaatcctgtcaacttctaggcaggaagataggtctgttttgagggaaattgggatgccataggaattcttacccacttcacaaagaagctagaatagagtctgtatggattattgactctaaggaactaatataaatcttctgtattcagacatatcagcctgggtttttacttgcatgccacagaagctgattttggttggctaataaatttttaaagatgttgagttgctgtgaaattgttagaagggctagagagagatgtctgcaggcactgcagccagggacagcgcatcaaatcttacacagaattggcccaggccggatgctgctgctgtgttcctgggcgtagacagtgtagcttgcaccagatgctgcaggcactaaagtctacagtgagtgccttggccactgctttctgggatcttgatcttgctgcagctaccattcttgcagtgagcattttccatcatagtccttgctttgcagcattagttcctgaatcaaagtctgggacaggtgtaaataatggcagggtcaagggggcctcctagctgcaagggggcactgagaaggcaggcagctggcatttttagcttatttaatgggaggtagaccctacctttaactgagactaataaggtgggaaagtccccaggcttaggaaagaagggttcaaaagctaggtagtcagaaagaatgtcagagatcaagtactcttgcccagatataattcagcgaaccagggcaaaagaagaatatttttagccatgagggattcatccatctcatttgaacaaatattcagatgtccaattggatgctggtaattggctcagaatagaaatatgaagatagaagaaaatgaataatataagtaacagtagagagcagtgaatgttgcagcaggaaacattgcatacataaatggaagatattaacacggctgaagattcagaatgtaagtgtaaagtaagaattcttggaaggatcgtactgccttggaacatctaggaaatagcgtggaactaaaaattctagaccatctcagcaaaatcctgaactaggattgcaggcattcagatataaaattcctctaaaaatttcatctttgttggtgtgggactggggggcatggttatttagtttggatgaaggtttaattaagagtgttagaaatggcaggtaactactaaccaagtagtaaaacatagtattcccaaaataacagggatcaaggatgatagtgagcacagaggtaagcaggccaggaaggaataaagagaagtaatatcaaattagcaaaagcgaggagaggaaaaagatgaaatgagttaacaaatagtaaacaaaatcaagtggaaacagtaaagccaaatgagcagccccacagtaaatactcatcagctaaactcacctattaaaaaacaaaggtccagaatattagtgtcagagcaagatgcaagaacaaaagcattgaacaggactaagaggtactatatattggtagaaaccaaaaatataaagtataactgcctttaagcagcaaaatgcatagaacaaacaccaggaacaaaagaatttggtaagaaacatattctactaagagatgctaattatgtgtcttttctaatttgacgggtcagctaagctaaattgccaacttggatgctcacaggggccggtgggtggcatgaatatgtgaattatatggtgagagaccagggatggtgggaattgcacagcgaactggataatgcatgtcttgcctaaaggcattgaaattcatacattttaaagcactttgccagccaaacaaaatatatttgtagcttgcttgcagcctgccagttttcaacctttgaaacaaaaaagcaaaagtatagaggttagaaacaacatatgcaacaaatgtattgcatatgttgcaaacatatttattgcgaaaatgtacagggaatgtacattttcccctaggtctagggagtatttacagaagttgatcatgtcatttatcacagaaaacaaaaagtgaaatatgaaaattttgatttttgtatgcaataacctgtcctgtcagtccagtgaaattagtggtaaaaaaaaagagatgattataacaacaacaacaaaaactaccttggagttaagagccactgttgtaaaataatctctgcaccaaaagaaaatctagacaaattataaatcatctagaaataaaagaaatagaagccttttgatatcaaaatttgtagaatagaactgaatctatagtcaggaaaaagtataatcttagatgcttttattagtataagaaaagaaagactgaaaatataagagcgaaatattcaacttatgaaactagaaaaaagtacaaaataaagagaaaggtaaaagctgaaatgaatgaaatagaaaataaaatggtagagaagataaataagaacaacactagttctttgaaaaggcaaataatggaaattattcttgattaaaggaaaaaggaaaaagtattagcaaagaagaatccattgttataggtatggaataaatgaaaaattaaatctgcagcaatatttgtgaaactctggaggaagtgggcaatttcccctcaaaatataaattcacaaattgttttctagaaaaaatataaaacctgaagtattattgctagtatttaacattgttttggtattgatgcaataaggcaaaaacattttttgttttaaatactgaaaaagaggaaaataaacttgacctaagaataagagaatttgtgattatatataagataaatataaaaacaaaataccttttttctatgccatcaataactggttagcattggaacgtgaaaaaaaaattcaattcacaaataccataaaatatctaggagtaatttaaactagaaaattataggacataaagtgaataaatattaaatcttactgtggttcataaaacaagacctgagataatggagaaactgcagtatgttccagggtgggtagatataatgttataaaattgtccttcccaagtagcctgcttaagagactaattctccccagaatttttcattaggaaaaaaggaagctccttacatttaagtcttagaaagtgtctttttaaacttggcatgttcttaataactttatttttgaataacgaagtaatacttcagacaaacctcaattttttctttttctttctttttcttttttttttggagacagggcctcactccactttcccaggctggagtgcagtggcatgaacttggttcactggagcctcatcctccagggcccaggtgattctctcacctcagcctcccaagtagctagaactacagttgcacaccaccatgtcccgctaaactttttgtatttttagtagagacaaggttttgccgtgttgctcaggctagcagcaaactcttggactcaagtaatccgccttcattggcctcccaaagtgctaggattacaggcatgacccaccacgcccaacctcttcaatttattttaaattgagttttatagaggccaccggacagaatcggtttaaaaaaagatagacaattttgttttatttagtacttattccattgggtatgatctcatagttacaagtattgttgaattgaggctttgaaagactatataacaatgcaataattggttaggttgtagagatcacaaatgtatacctacaggaagaatgtttttaaaaaaactgacctaatgtcatataagtacgtatttgtgacttagtataacattttcaatgacagcgtaatactatcattggattcagaaagtactgagtctcaagtagcttagaggatagaggaaaggggtgaagaaagagagaaccaaggtgatgcatgatacctgcactgcctgttaaagagagcttccagaaaatgcttcatccgcttggccagaacctagccatctggccacacccagctgcaaaagacgttggaagtgttctggaaccaccaagtgcccaacaaaaagttgagttaatgaggaagaaaagagaacaaataatggggtacaactagcctctacttggacataggtagtactctgggggaaaacattataaaatatgctgaaatattagtacgcttgtaaacaaataaaagtaaatgccaaaagaggtggcggtagaggtcagtaggtatagggtgatgagcaatcaagtggcaaaaaagaaaaacaaaggtgttcaacatcagtagtaatcagagaaatgcacatcaaaagaaatcacttttcgaccttcaaaaataataacttccagtggtggtaagtgtacagagaaacaattactcctatatgtctacccctgtggtgtgtgaatgattgcaatcttttttataaagcaatccggcaataattttgagattgaaaatatgtttctcttgaggaatccaggaattctgtcttgtagacataaaagcacaagtacatacttaacgttgcaaatgtaggaaaagtttgctaattgcagtactttttttgttctggcccgaatctaggaatactgaatgtccctcagtaggaattggttaaataaattatagtacagtcatcctcagtatccttgggagattcattccagaatctcctatggatactaacatccacagataactcaagtccctgatataaaatgctataaaatggcatagtatttgcatttaaactacgcacattctcccatatagtttaaatgatgtccagattacttatactacctaatacaatgtaaatgccgtgtcatttgttgttatactgtattgtttagggaataatgacaagaaaaacatgtctatatacattcagatgtacccatccctttttcccccaaatatgttctatctgtggttggtagaattctgggtggggaacccagaaatatggaaggccgactatatcattcttatgaaattttattaaataagaatgatgtcaaccgggcgtggtggctcacgcttataatcctagtactttgggaggccgaggcaggcggattgtctgagctcaggagttcgagaccagcctgggcaacacggcaaaaccccatctctacttaaaaaaaaaaaaagacaaaaaattagccaggtgtggtggcacgtgcctatcgtcccagctactcgggaggctgaggcatgagaatcgcttgaacccgggaaatggaggttgcagtgagctgagattgtgccactgcactccggcctgggtgacagagcaagactcctgtctcaaaaaaaaaaaaaaaaaaaaaagatgtagaggtaagaaatattattaaaaaggacaagtgagagctatttcctgaagctatgaccaggatgtattatcaggtgacaaatataactcacaagagagtgtttacacctttatgtcatagtgcctatgctgtgatcccaaacgaaaggctaagcatgtttgtgtcaacacagagagaatgtattcttggaagaatacattctttccaggctgttcataatgattatcccaggcaagtaggggattttgattattttgctcttagaaacagcatgtattgtttttatatgtgagggcttaggggagtttagtgattaaaagtatgaactttggagcccgcatttcctgagtttgaattccagctgaagctgtgtgatcttgggcaagttatctctactgtgcctcagtttcctccttggtaaaatatttgtagaaacaggacctactgtatatagtttcaaacaagtcagtatatgtaaagtatttggtaccgtagaagttctacatgagagttctatataagagagggccggctttattatttttaaacattttaagtattattattaaagtaagtcaagggtagaggaaaggtcattgtattctttccgtggtaaagtgctgaacatattttcatcagtcctagagcttgattttgaagaacatggtgatgcagcaaaatatttcttaattatgcctttgcctcgttttcagtggagtgaagaaacaggatcagctggcctgagaaagtgcgaagcacagagttttgtatttaacagcgagtgggctttatagctgtcttcactgtgtttttggaattggctgattgtccacagaattcacactggttcgatgtctaaacacttcagtgatgcaaaaatcagtttgggaaatagagacacttgaatgaatgggttttgagataaaaatctgtcttgtcatcctcctgaggtggagcagattgcattttccagctgaggctgtgactctcccttgtcccacatgccctcctacagtgtgactctgccacttcctctgttaagggatctacttcttgaatttgggcagccctagaaccgcttcagctggtagaagagggtggaagtgctcctctgactgctgaggctaaattataaaaggctgtgcaggcccctcttgtttgcgggggcacttgtgcttggagccgtgagccgttctgtaataagtccaaccactgtgaggctaccatgctggggagactaccacatggtgctccagcccacagtccgtggagctgtcatctcagccagggtttcggatggcaggagccacctcctagtgtctatgtaagaatggcctagccaagctcttcccaaattcctgaccggcaaaatgatcagaaaataaaacggttgtgttaagtgatgaggttatggggaaatttgctctgaaacagtggtggcaggaatgtaagggttagtaaacagcagcgactctgtgatgaaggaattcattcattcatgttggaaagacctttgcagagccaacctccactactccttgcacccagattgatggtcccatgaaccagaagcatttgtctagtgataatcacaggagtcttcaagtgtggtgtcctgttttgtatttttatttatttattttttttgaggcagagtctctctgtgttgcccaggctggagtgcaatggcacgatcttggctcactgcaacctctgcctcccaggttcaagctattcttctgcctcagcctcctgagtagctaggactacaggcgtgtgccaccacacccagctaattttggtatttttagtagaggcggggtttcaccatgttggtcaggctggtctcgaactcctgacctcaggtgatccaccctcctcggcctcccaaagtgctgggattgcaggcatgagccactgcacccagcttgtgttttgtattttttatttcacgttgcattttaactacagacacatcttggtgatgttgtgaattcagtttcagaccaccacaataaaatgaattacatgaggtttttggtttcctggtgcatacaaaaattatgtttacactatattgtagtctgttaagtgtgcaatagcattacatcttaaaaaaagcaatgtacatgccttaatttaaaaaatattgctaaaaaatgctaacgaagtaagcccattctgttggagaaatgacactgatagacttgctcgatgcagggttgccacaagccttcaatttgtaagaaatgtattatctgcaaagcacaaaaaagcaaagctcaataaagcaagtgcttgtattgtgtctcatgtatactaaaagtatgccaaatggtttacgtgatttttgtatgtatgtatctgcttatgagacagggtctcactcccatcgctcaggctgaagtgcagtggtacaatcacagcttactgcagccttgacttcccaggctcaggtgatcctcccacctcagcctctcctgagtagctagagctgcaggcagacaccaccacacctgggttttttttgtattttcagtagagatgggtgtctcactatgttgcccaggctggtttcaaactcctgggctcaagcagtgctcctgccttggcttcccaaagtgctgggattatagatcataggtgtgagccactgagcctggccaatttttgtttttaattgttgcctgatgtcccctgctgggtcctgaagtcttttgggttggtttgttttcaactggcacactacaccagttctatgtgctgtattaattatacaggtttgagtatcccttatctgaaatgcttgggaccagatgtgttttgaactttggattttttttttgtattttggaatacttgcattatacttagcaattgagcatccctaatctggaaatctgaaatactccaatgagtgtttccttttatggtcatgtcagcactcagaatgtttagggttttgtatttttttctgaattagggatgctcaacccgtaccagtatactacaccagggaactgactcggcattggtcagaccacattttgaacactttttggttgacttcccagcatttaaccccgtcttctcccaggaattctctttagctaattcccactttaaagtgagtcagcatatcaccctggtctcagtgagtcaaggatggcagagactcaatcagaatgagtgttgagtagatgttttttggggtgcctgggagagagtccccgctctttgctggatttgatggtgtgcagatgtgagccctggagctgccagtaccatcacatagccatgagggcaggcagcttattgatgaaggtgacctgtggaggaagggaggagcagaagatggagagaaattgaccctgagagaacatctttcagttgagccagacctgaagttggacttgatcctagactttcagttatgggagtcaaaacctctttttattgttgtaagcttgagttgggttttctcttgcaaccaagagatttttaactcacagaaacccacatctgcagtgtttctgagattctgggtaatatttcagagggaccttggtaaatcagaagctctctaggcagtttatccaatgaatggaccccgggacctatgaggcctggtgggaagaattaggaatgttttgagtgaagatttagaagaccaatggggaaacaaagctgcctgcagacattcagatgtcacgtggaagaggcaataaatttgttctttgtggttccagagtgtttcagaactggaatcggtgtgtgccatgttaatgaagatatagaattcagcctcatataaggaaggattgtccaactatttgagctgctcaacagtggaaggggctgtctagtggtgggtttccttttactgaaaatattcaatggtaactggaacatgagactttagtagatggcaacagaagttggatgctattgatgccactttgaatgaaaaattaggttatatgatttctgtttcttccagttctgaaataacgtgattttgtatttccttaggtatcaaaagacatccttttttttttttctttttttgggacagagtctcactttgtcacccaggctggagtgcagtggtgtgatctcggctcactgcagcctctgcctcctggattcaagtgattctcctgtctaagcctccggagtggctgggatacaggtgcgcaccaccacgcctggctaatttttgtatttttagtagagacggggtttcaccatgttggctaggctgatctcgaattcctgacctcaggtgatattcctgacctcaggtgatctgcctgccttggcctcccaaagtgctgagattacaggcgtgagccaccgtgcccggcttgtattagaagatatacttatgatgtgaccgttgggcaaattatgaagtctctcagactttgtttctttatctgtaaaataacaataataatacttttatgaactgagttttgtgtgcctcaagttaatgtatgtgaaagtgcttacaaaaccaaagtgctacacaaaggtaaagtgctgttatccttcctacatagtaaactccgattcaaaggatacggacgattccttaaatttctttgtgtgttttgacccatgggtgctttgaaaaaacaactcccacccccaaagtgatattaatagaaataaacaggattttgcgtgcccagtccatctaattatctaatttctccagttacaaattcaggtgaatttattatgttttcctggtagaacttggaagtttctcagtgatctctgtgaggtataactgaggtacacctgagccataactgtaggaagtcagggcctgattatgatctagactagactaggtggttctcacttgcatcgagcctccgtaacctggaggttagcttttcccatctgtcctgaaagtaaggctgcacgtgaatatggcagatcttttagttcactaaagcctgcaccctcagctcctccttattctcagtgtttggtgcctggagactgtgggctttattttcccacagtgctgctgggagatttctgttcagaggtgccaagctctctagttaggcaatgaggatttcatttggcctacacaatgggcaaggaagctaaggcgcagtatgcagagagaattctgggacgaagcgctcctccagccacttcagtttcaatggaaatttgatgtccctgcctgctttgcacttttcaaatggcctgtcaggagttgccctcccagagctgcttggcattctggcttctcctggagatgactaatggcagctggttgtgtgggccgcctgctagaagctagtcagaccataccattatctctcctcagaaacactgaggctttgtctgctgccctatctcccctgcatcctgacacagagcggtcactgtgtcctctccaggcctgagccccttcttagtgttagggggcttttgttcagaagctttattgtccccctctttctggagtgctgttcatagtggccgtggtacagcatgagtatttgggaaacaggaggagtagatttacaagcattttgaattctaatccaatttgctgagcaagtggagtgtgaggaaaattaattttgcattcttcccaaaaaaagtaaaatggagatgagatagaaaatgtttatccctttacaaaaatcatctttacacattgacactgctgtttgcttttaacaaaggaagtaaaatgggtgagtaatttggttcatttgcatgagtgtaggactcttttgtgtttttttccctccatttgatttgcaaagacaatttctattgacttttagtacaagttaggtatgaatctctagaaagcacaccactgagacgacccaaaagacagtccagctgtggaaaaaactacttttctgtcatagtcaaggtggggccccaagatttgataacagacttagttccttatggctgtgcatctgcttgctgaattgcctcaaacttctgttatctcatttgttctaagtccaaaggatcagtgctgcctataaagctgacggattgctaattgcctgtttccacactgtactcataaacattcatatttctttttcctaattttcattatcaaagtagtatatacaggggttaaaataatgaaccaggacaaggagcttattatgaaaagcaagactgctgctgccctgctgccctaccccttcccatttcttgtccctcttctcaaaggtaaacactttattatgcttttactgccttctaaaaaaataaacactcttttttaaagagcagttttaggcacagcaaaattgagtgaaaagtacaagttttcctatagtgtactcctgttcccaaacacactcagcctcctcattatcaacatcttccaatcagtgaacccacaccgatgtaacattgctcagagtccgtggtttacattgaggttcactcttggcattgtgcattctgtaggtttggataaatgtataatgccatgtatccaagttttttgtagagacagggccttgctgtcttgcccaggctggtctggaactcctggcctcaagcaattctcccaccttgcctccctcccttgggggtgggggatgaatgggcaggcacagtagctcacctgtgcctggctctacttattcattcctccctccccccaacccctggcaaccattgatctttttgctttagcaagcaaaaggaccatagttttacaaaactacggtctctgtagttttgtcttttgcagaatgtcatagttggaatcatactgtgtgtagctttttcagactgcttctttaacttagtaaatgcttcagttaaggttcctccatgtcttttcatggcttaatagttatttcattttaaggggtggatgatactaatagtccattatctgggtgtaccacagttggttgcttccaagttttggcagttatgagtaaagctgctgtaaagatccatgtgcaggtttttgtgtggacatatgtttttgactcatttggctaaataccaaggagtgctattgctggatcatagagaacaagtatgtttacttttctaggaaaccaccaaactgtcttccaacgtggctgaattattttgcgttcctaccagcaatgagtcccggttgctccacatcctcaccagtatttggtgttcttattgttttggattgtagccattctaatagttgtgtagtgatatctcacttttgtgttaatttgaaattgcctacggatgtatgatgtggagcagctttttttttttttttttttaattatactttaagttctggggtacatgtgcagaatgtgcaggtttgttacataggtatgcacataccatgatggtttgttgcacccatcatcaacctgtcatctacattaggtatttctcctaatgctatcccttccctagcccccccacccactgacaagccctggtgtgtgatgttcccctccctgtgtccatgtgttctcattgttcagctcctacttatgagaaagaacatgcgatgtttggttttctgtatataccccttaatgggattgctgggtcaaatggtatttctagttctagatccatgaggaattgccacactgtctgatgtagagcagcttttcatagctcattttccatctgtatttcttcttcggtgagttgtctattcaggtgtttttccatttttagtcaggtgtttcgttttccatttttttctttattgagacagtgtctcactctgttgtgcaggctggagtgcagtggtgcaattatgacttactgcagccttcacctcctgggctcaagtgatccttcttcttcagtctcctgagtagctgggactacaagtgtaagccaccatgcccagctaatttttgatttttttgatgagacgagtctcactatgcagggagaccccttgagacaggggtctcaaggctgcccagactggtcttgaacccctggacacaggtgatcctcccgccctggcctcccaaagtgtgctgtgctgggattacaggtgtgagccattacaccgagccctcattatcttactgttgagttttgagcattctttgtatattttggataacagtcctttatcggatatgtcttttgcacatattttctcccagcctgtggcttgtgttctcattcttttgatgttgctatttttttccccaattttgttgattcctcttatgatagatgaggatttaacacatggccctgcaaccctctcctagtgtcataatatcactgtttttagtttctttcttggttattgcttttagtaatgtatttcatctttatttcttgtcttgtcaactgtatatagtatctttgacaccctgtttgtaaggtgagggtggatattattgctgccatcctttttgcccactctctctgctttctcttctacctcccagtttctttcatctgtactttacctttttcactagcaaggatgacagtattcatatgttctagaaaatagtcttgcatgttctgtgtgtagtatggatattattgtgactacatatatattgtgccctgcagagtgaagttatgtgctgtgattttgttatctgtcttatacagcttatttttatgaagtttcttgttttgtgactatttttgttacaggaaagggggcccgatccagaccttaagagaggattcttggatctcgcacaagaatgaattcagggcaagtccacagtgcaaagtgaaagcaagtttagtaagaaagtaaaggaataaaagaatggctactccatagagcagccctgagggctgctggttgcccatttttatggttattttttaatgatatgctaaacaaggggtggattattcatgcctcccctttttagaccatatagggtaatttcctgaagttgctatgacatttgtaaactgtcatggcgctggcaggagtgtagtagtgaggacgaccagaggtcactcttgtggccatcttggttttggtaggatttagccagcttctttactgcagcctgttatatcagcaaggtctttatgacctgtatcttgtgccaacctgttatctcatcctgtgacttagaatgccttaactgggaatacagcccagtaggtttcagcctcattttacccagctcctattcaagatggagttgttctggttcacatgcctctgacatttcccccctcccttttataagagaacgcttaatcctaagggttgcggagggatgaagattcatcttctataactccttcaggctgaatagaggtgatgatattcctgcctgactattagggtctcttacattcagagtagagaggagcagagtcagaaagcatcagtatggtaaggtccattcataactcttgagtttcgacagagggtggtatctggaagatgaataagagtttaagaaaacattcagtaagcttgtcctgtattcctacacaaaaagtataacagcaatatattccacaagagtaaagcaaaataagtaaagttattccaagtaaactaaattagaagactttccatgaactgggcaactgttggaattaagctgatatagggttgttagctgattgtaatgtgcccagaattagaatactaatccagatttttacattatccatccctcttgtttcttctgagcagcagtcagagatcactggtaggttcacaggaataagcaggtgtagactaaattgcagaaacaaactgaaaaacagatgagactagaatttaataacaggtgtaccatagttcttgaaacatatttctctctccagttttccatttttacgaaagacaaattatggtaagactgatttgttttattatacttggcctgataatttgtataaagtgcagcaagaataattatttttcacataggctttttaattgactttaatggaactctgttttgtaagggatctcagataagactttttaaaagctgagccccatcatgggtttgtaccctcaaatacctatgagttgggtaaattcctttctttttgaggtcccaggataacttggggctcttcgacctgtgagaaagtgacattctttacttaccccaagtcagaaaccttgaacagggactgttgtagacaaggtgtgaggccagttccacacaggcttttattggctctataaatcaagtttaattccttaaaggaaaacacaccattccagtcaaaaccttggtaacataaccaatttctccaattgtgttctgttagaaaagagaacgaatttttttttttttttttttttttgagacagagtcttgctctgtcaccaggctggagtgcagtgacatgatcttggctcactgcaacctctgcctcccaggttcaagcgattcccctgcctcagccccctgagtagctgggactacaggtggcgccaccacgcctagctacttttttgtattttagtagagatggggtttcaccatgttggctaggatggtctcgatctcctgaccacgagacccacccgcctcggcctcccaaagtgctgggattacaggtgtgagccaccatgcccagccaagaaaacagattcttattgcacctttgcaaataactattttgctgtaagttaagaatactcacaactagttgccaaattctggagaaatcaggtagagagaaacaaatatgctcagaattttgtgcataggagtatataaactgttaagagctataatataaatagctcaaaaggaaagtttccttgactctgaaaaacaaaggatcagtagtgttttatgcaaagtttgaaatattacttccgttttttattggttcagtgaatttaggtaactcctgttttgcttgatattcatgaacatttcatctctccatgagagtcctgaaagtttttcctctattctgttgttacgctctccaaagttacaagaaaacatgcattgaagaacacctgttagagttctataattgattataaaccaccttctaaaggagattaaaacaagacagtcatctctggatgataaaaagctttaggacagccactattaaagccacatttgataaggaaattttgttacttctgtgatacacagaattttacataacaattataattattaataacacactaaataatattagaattataggagtttcccataactttagaatataccaataacacatttatgtaaatatagtccaaagaaagcaaaacaccatttcacattcgattatgcttcctgtatgatttttatatcaaataagccaaatgtcactgttgtattagtgcattatagatataaaacccaatttttttttttttttgagacggagtcttgctctgtcacccagtctggagtgtagtgacgctatcttggctcactgcaacctctgcctcccgggttcaaacagttctcctgcctcaacatcctgagtagctgagactacaggcaccagccaccacacccggctaatttttagtatttttagtagagatagagttttgccaattcttaataaaaccttataaataaataaatctttccaatcttaatcagtttgaccataaggtaagattctcataaactttttataaccctttacaagtttttgttaaagagcaggtcataagcaggtttttgctctaagaaaccaattttaatttatagaaaagctgaataatacccctttaatttagccaatgtccacacactggctattttaatttgctctaagaaaccaattttaatttatagaaaaactgaataatacccctttaatttagccaatgtccacacacagaatctcttttacaattaattttttacaaaccttccacaactgttcaaacctttagctttattctaacttaaagcaattctttaaccctttaggcaaaaaacccatattcccatgccttcttataatcttttaccaaaaatatattctactttccttacacaccttacaggtaaaactatttcttcaatagtctcaattacatgttacaatgttaacttttagcaacttttatttttggtgaaaaccctggttagtaagcaattttaattgtgtattaggtgtggagcctagccttaggacacgccaggcagaagtgcagataagggctgactctccagcatagctagggggcatggctaactccacatgtccccaggccttaccttacttaagcaggcaagttatacagtaagagtcatagtggcattttatgacgcatttaggaggcctaacaacctttgaattgtgcaacatttcttgcataaattttctttcaaaaatcctttcacgacttacacagaccatctgagacattcttggactttctgacttgccctaaacatccctccttttaaacaaccattttattttaggagaagaatttaccataccaagatcttttcttatataaaatctttctttataatcatctttgtatagctagggggcatggccaattccacatgtccccaggccttatctagaatctaatggctttaaggcaggtaaattgaacaatttttaaaagttaaacagtttatgaccttaaagcatttaacaaacttaatatctgacctgcataatttagactgaatgtttttattttatcagtaatttttaaagctgtttgtatttcccgaagattactaagattacatgaactaaaaggcattacagtttttgttttgctttcaaaatatttgatttaagcacttatttttgtttcagccaattagacttcttttatataaacattacacataatatgtatatagctacccagaaagaagaatattactacagtagttgtaagatttttcatttgccagtttttaagtttcttaattggattactggctttaaggtggagccgttggaagaacagggccaggaaagggggtccctggtgcctcctgtttttcccaaggagttcaggctgttagagcttgaatatctgcttttaattaaactgattttaaccatagcactctttaacaaagtctttttagaattttttatgccaaacagccaatatttctggcttttgaactttacctaaggtaacctccaaggtgcttagagaaaggaaaatttaagacagtccatggaggagaagagaatagacaaggtcacacagatattaaaccagaaacgacttcctagggaaggaatcaaacccgaactgctactgtgaaagtgcaaaaccctggcttctgagctacagcacgggacagtctctgtttcctttcctagaaggaatttagagtagttaattttgagcttgcaaaggcttttaactaatatgatttttagatctaactatgacatgaaccctaaaattcctgttccctggaaggcagagaccaaaagtactgccacatggttacaaggtcaagctcccaaggacataaacaaggtggagacttcatccacttttttgtttgtttcagggatctgtagccaagtttgttactgaccagctagcttgctggcttatcttgaaaagtgggcctgcaggtattctaagcccgtgttttatcctaaagcaccccttgacacggaaaaagaaattcatagcacaaaatacaccagcttaagactagccttagaatttttttttgcattaatcaaaacattacagaggagataaatactgatttttccccccattcattcaactgtttgcatagagagtgagaagctagaaatctgactggcaagaaattcttaccctttggccagcatgccaggcttctgggttccctttccctgagtggcactagtgatctggcttgcagcaccattgccctgggggccaagcctcatcataaaggaaaattacttttttttgttctggccagagcaaaatacatgtgataagacatagacattagccactctgcttaacacccaatatcaaactggtgaggcttaaatttgcccccaaatgggccccgtcatctttaatccagcctcagacttacgtggcctctgggcaaggtggttgccctgagtaacagaaaagataggaaaggaaaagtagagagagaaaagcattgcctgtagcagggtggggaaagcgaaatgatcagggaggtcagagaaagacccacccattgcagtgacattgaaaagttcaggtggctgctcctcagtagcaaagggatcttttccagccatcccatcagctcttaagtttccccttttagggaagaaaaagttccccatgtcccatagtcctgtacatacctgactctgtcacccacagccattagcaaagagtgcaaggcagattaatccaaagagaatagcagttaacatcccatagtgccaaacctgttcttacccaagaaggcctttactgagacgggcctctaaccccctaaatcttagaagggactctatccctcataagttggacctctaacccttgccttttattaagaggggcactttgtcctcttgaatcagagactaatttttcagacttgtttcatggatatcattttgagacttctcttgactggtttcctgtaatagagccactgctttctcttcctctttggtttcctcccttgtttttctggaacacatcctcaaataacttccttagaaagggtattaacagtttaattttctcagtttttgcatgctttaaaatgtattctacctctgtgattgatttatagttcatctgggtagagaaatctaggttgaaagtcattttccctccgaactttgaaggcttttgctttgttgccttctaggctacatatgtggtaatggaattgcaggatcttatggtagcttttttttttttttttttttttttgaaacagagtcttactctgttgcccaggctggagtgcagtagtctgatttcagctcactgcacccttcgtctcctgggttcaagcaattctcctgcctcagcctcccaagtagctggagttacaggcatgtgctgtggcgcccagctaatttttgtatttttagtagagacagggttttgccatgttggccaggctggtcttgaactcctgacctcaggtgatccacctgcctcggcctcccaaagtgctggaattacaggcgtgagccaccgtgctggtttttttttttttttttttttttttttttaaatagagacagggtctttctctggtcacccaggctggagtacagtggtgtaatctcagctcactgcagcctcaaactcctgggctcaagtgatcctcctacctcatccttccaagtggctgggaccacaggtgcatgcccccattcccaggctaatgtttaaatatttttgtgtagagatagggtctcactctgttgcccaggctgttcttgaactcctagtctctagtgatcctactgccttggccttattttaaactttttgaggaaactccatactgttctccataatggttgtactgattgacattctcaccaacagtgtacaggggttcctttttctccatatcctcaccaatacttgttatcttgtgtcttattttattttattttttgagacagagtctcgctctgttgcccaggctggcgtgcagtggcgtgatcttggctcactgcaacctccgcctcccggctttaagtgattctcttgcctcagcctcctgagtagctgggactacaggcgtttgtggcaccaccgcccggctaatttttgcatttttagtagagatggggtttcaccacgttggccaggatggtctcgatctcctgaccttgtgatccacccgccttgacctcccaaatgtagtacccattctaacagaagtgatatctcattgtggttttaatttgcatttccctgatgattagtgcatttttttcatatacagtttggctaactcctgttttctaatttattgcacagatgtaatcataaaagagaaacagtaacattactcacagaccaaccagcttaatactcagctgttctcaatatcatgtgttctgttatagtttgtgaatgcttattttatatgaattctatgaatgcttagtttgatgtactcgtgattgaccacagtataatttttcattggcatttaaaaaatgtcacacttcaaacatgtttcttctttatgattgtgttaatcttcataattatgagatggagcttgcttttatgttaacttcttggaatcagccagcctcaggaggatggtacacataagtgatgacggggtgggagcagcacaaaagatccaatggtgctggctgagccaatccctgttccactggcccttctctccactgtcccttatgtggtgctgtgtaaggaagcatggccagtctcaggacttcagagtgctttggttagcagtgaggtctgactcccactgcttcaaggaggtgtcgtaagctgtagggctgttgctctttacttttccctgtcagtacccacgaggaggtgtgtttgggctggaggcctgggctcacatggtgggtgcacaaccaagaccatcatcattggtctgatgatgaatttttagcaactctgaacctaacctgtgctctgtaacagtttctgaaatgaggtgtacagagatgggaagaatcttttggaaaacagagacagacatagtaaaaaaaaaaaaaaaggaaaaagaatagatataacaaaaatatggctggattgtacatttcataatacacatccattcataaatatactttagtttcatggttttttaaaaattcctagtagtatagataaggcagaagtaacacttatggggagaacagactgcaatttggcagcaaaaggaaggtgttaaactgtagctggaaataacagcagacttgatctgttctatattaatttttccagcttcaaaaccaacaaacaattgaaggtttaaaaaaaagaaagtggctgggcacggtggctcacgcctgtcatcctagcacttgggaggccaaggcggggagatcacctgaggtcaggagatcgagaccagcctggccaacatggtgaaaccccatctctactaaaaaaaaaaaaacaaaaaaacgaaatacagtaaattagccgagcatggtggctcgcgcctgtagttccagctattcgggatgctgaggcaggagaatcacttaaactttggaggcagaggttgcagtgagctgaggtcgcacattgcattccagcctgggcaacaagagcaaaactccatctcaaaaaaataaaaaaagaaagaaaaagtcagccttaatttagtgatgttattaagaataacaaatgccagtgtgatgatcagtcctggactctcaggtttgcctgttctgactagagttatggtgaaactttagttatcttccagtttttaatacggtccttgctgcaatgactttattctagagaactagcattactaaaacattttagtgcttagtggtttttaatacttatttcacaagaataattaaataagtcttttcctcgttgagtgtgtagtatgatgcaggttaggtatctgtgacacctataagtaaggctgacccatgaacaacactagcttgaactgtgtgggtccatttatatggagacttaaaaaaaataaatacattggaaaattatttggagagttgcaacagtttgaaaaaaattcagatgaactgggtagtctagaaatatgaaaacaattgagaaaaagttacatatgtcatgaatgcataaaatacatgtagatactaataatcagttttatcatttactaccataaaatatacacaaatctattataaaaagttaaaatttgtctaaacttatgcacacacagactgtacatggtgctattcatagttgagagaaatgtaaacaaatataaagatgcagtattataactgcatacaattaactgtagtacatacagtactcctgtaacaattctatagccacttcctgatgttgttgcagtgcgctcaagcattgggggtagctgcttggaaggtactgtgatgctaatcatctctgtgggagcagttcctctctccagtacacctcagatcgcagtaaaaagtgacctcttgagattcttgagtatgttttgttgtgtttagtgcagtaccacaaaccttgaataacactatgggacccatacaaagtgccactagtgatgctggcagtgctccctagaagccaataaaacccctgacagcattgaattgcttgctagattgaggaatggttgcctgtcgcttcagacagatgattcattttgcaaacagaccatgtaaacttatggtattgataaatacagtatggtactgcaaatgtatttcctcttccttatggttttctgaataacattttcttttttctatctcattttatcttaagaatacagtatataatacatataacacaaagtgtgtgttaactgtttatgttttcagtcaggcttccggtcaacaataggctattagtagttaagtttctggggagccaaaagttatacacagagttttgactgcatgaaaggttggcacccctaacctccaagttgttcaggggtcaactatattaaaagtctatgatatactcttggctttccagaaacttaatttgaagaagttaatttaaaaaccatagttttctatatattaatttgacagttcagcctttattaggtcaaagtttcaaaagagctcagctgttagatgtttagtaatgaatgccatcagcctttatgtcatcaggattcaggatgtttaggtgtgtgtttgctcagggctcagaaatagtcttggtggtgggtttacagctgcccatcttgttaggtgtggaacctgccttagcgctggggctgctgccagtctatgggaacattccctcccgtgcccttcctacactgtagaggcctacaggttgatgaccacttctgggacccttcattacacctctcactgaaagcatgtagagttgtgtaagtgacagcagccagccttgactcatcaaatagtctttcagtttgtaaaaaaaaaaaaaaaaaagtccaggattttattttacactgtaacatctgaggtgggtttcaattctagagcacaatggagactgatgtctgggtttcacccctagaattgtttttacattgtctgtgatatagtacagatgaaaataaaagagaattatttacaccttacatttgctgttacaagtattctgtattatgtctatatcatgtcaagtaacataggtatgttcttatttcatttattcttgtttctccatgtacacaaatgagtacatcatttccacttacggcaaaagtgatatgtcattgtatcagatccatctctcagtattatctgtatcttctgatttcttaatcaaatttatgctgtcaaaatatgttaatgatgttttttaaagtgtttattgagaaattcacaaagaacttgtattttgtcaaaaggccattgtttttgttgccaacattatcagtgcagatgtactaaattgcaagttacagaaaacccagctcaaggtgacttataggaagggtatttactggcttgcctaactgaaaggccagctataggccaaacttcagggttgatttgatttagcaacttaacaatgctattgagagtttagtttccttcttccttctctgccatctgcattcccaccttcctcttgaaagggcagggtggttgccagccattcccacacctacacattttctcactctggtcccgtggtgtttaatagcttgcccagaaaaccttccctttgtcacattgatcttaattgagttgtgtgcccatgcgtgaaccagcaactggctggggatggggtcatcctgagtagctcaggcttggagtcagcctcacccaaagtatagggctgtggggaggaagcacagaaaccacagtcagaactgggtaattagctagaggaggaggaaatggatgaagagcgacagccactgtccactgtgccatgtgatttacagtcatttgggttttgtttataagaatgcttgctttattttttcatttttttcttcttctgtctttaaggggcctttacaacaactaaacggacaggcattccagccccacgggaattttcagtaactgtctcaagagagaggtctgtgccacgtggtccctccaaccccaggaaatcagtgtccagtccaacttcttccaacactcccactcctacgaaacacctgaggaccccttccacaaagcccaagcaagagaatgaaggtggagaaaaggctgcgcttgagtcccaagttcgggaacttttggcagaagccaaagcaaaagatagtgaaattaacaggcttcgaagtgaactaaagaaatacaaagagaaaaggactctgaacgctgaggggactgatgctttgggcccaaatgtcgatggaacatcagtctccccaggtgacacggaacctatgataagagctcttgaggagaagaacaagaactttcagaaagagctttccgatctagaggaagaaaaccgggtcctgaaggagaaactgatctatcttgagcactccccaaattcagaaggggcagcaagtcacactggcgacagcagctgcccaacatccataactcaagagtcaagcttcggaagcccaactggaaatcagatgtccagtgacattgatgagtataaaaaaaacatacatggaaatgcattacggacatcaggctcctcaagtagcgatgttaccaaagcttctttgtcgccagatgcttccgactttgagcacattacagcagagacaccctcaaggcccctgtcctccaccagtaacccctttaagagttcaaagtgttctactgctgggagttccccaaacagcgtaagtgaattgtccctggcttccctcacagagaagatacaaaagatggaagaaaaccaccatagcactgcagaagaactacaggctactctacaagaattatcagaccagcaacaaatggtacaggaattgacagctgaaaatgagaagctggtggatgaaaagacgattttagagacatcctttcatcagcatcgagagagggcagagcagctaagtcaagaaaatgagaagctgatgaatcttttacaagagcgagtaaagaatgaagagcccaccactcaggaaggaaaaattattgaactggagcagaagtgcacaggtattcttgaacagggccgctttgaaagagagaagctactcaacattcagcagcagttgacctgtagcttgcggaaggttgaggaagaaaaccaaggagctttagaaatgattaaacgtctgaaggaagaaaatgaaaaactgaatgagtttctagaactggaacggcataataataacatgatggccaaaactttggaagagtgtagagttaccttggaagggctaaaaatggagaatggatctttgaagtctcatttgcagggtgagaagcagaaagccacagaggccagtgctgtggagcagacggcagagagctgcgaagttcaagaaatgttgaaagtagcccgagcagagaaagatctactggaactgtcttgcaatgagctcagacaagaattactaaaggcaaacggtgaaattaaacatgtttccagtctgctggccaaggtgagaagagacagctctttactggtatttgctcatccttgttcacatttctgcccttaacctctaaattcacagagcacagagaagcatttgcttagtctgtttcattcacgaagccagcattccagcttgaaggcctgttagattgcacacaggttgggattgggggatacaaaaaggaaacacccaaatttctgattatgggcggttcaaaatgtggggatgtagagtcaaatcagagtatgatgcagtgataaaagaatatcatacagcctatgcccaggctctagtctagtgcaaaggaggggcatctggtgtaacgtgggggttgggcgtagcacagaaggacttcctggaagaaatagcaactgagctgagttctgaagattgagtgggagtttgccagtctgtcagcatgcttttagctgccagtaacagaaaatgaaatcactcccaattttcaactaaaatattaccactattttggtgttttcttccagatatatgtgtgtgtatgtgtatcatacaagttacacaaatttataatcatcctgtacatgttattaactttttttgcatttgacattttagaaatattaaaacttttctcagcatattcctatcattaaatattcatttaaacattattttaaaggccagatactattttaatataaatatttcatatttaccctgttgttgaacatacatgtattgtcaaacatttgtggtctttccagtctttcaatattataaatacttttttatatctatcttactgtttatttaggaaaaattcctagacgatgacttaccgagtcaaagagtataaacattttaaagactttcaacacattcagccagattgcccttcagaaatattatgccagtttattcatcctagcggtcatgagatcatgagctttcctgagcctttgccagcacttggtattacattgttatatcatttaaatctgttaatcatttcatttttttaaccttttttgcttgggaagatcttccatagcccaagagcaaataacttttctcaacactttaatcagcctgtaattttgtttttgatgcaagaattgtggtgattttatgatattctgcccacctcccagagcagtgctggagaggtgcagagagatggcctcctatttcttgttccctccaagttctgggtctgatttagggatctactggcaagagagattcaaaacatcttcctaccttagtttaggggttgtcattgtttcaaggagcaaattatgccatgagctctcagggagatttttctccactgcttcgtctgtcttaagatgagtctgttgcagcctgattctgcaatttggccatctgatgagcttagtggtgggtcatgttaaggagtttctctctttgtctgtattctaaatttgtaggtattttattgaaagtacggaagtaattccattagaggttactagtcaggcttggcattgggttttaatatcttgtggagtaagattattctttttttactttaagattactcactactctctggcaaaatgttttatctcccatgtgcaccttcttgaagttctttatcagtccctctgtgtttttggtagtttggcattacattaaatgtgcatatcagtgagaaataatttgacatcttaaaaatagcttatttttttctgatcataaaatatttttattacagacgatttaaaaagtacagaaaagtataaaaaagaaaagtattacctttaatttcaccacttggagaaaaactgctaaccttttgctgtatgtcctttcaggccttttctcagtttatacatgtttgagcatgcataaaaacttgcattgatatgattatgatattttgtcttcctatccagaagagtagagtatgtctgtccacattccattacaaagaatcagttggattagtttatctattccactattaatctgtttctgattaacttgtttctacttttatctttattaatttttttgtcttattttttgtacattttggtttcttgactaaaattctttgttcatttaacttttttttatccttggttgataatgaaagcatttaaagttatagctttggtaaatagaggcaataaaatctggaatcttctggaataaactaaatgtaatttaaaggaaagtgtgcattttctgtagagtgcaaggcacaacatatatgtttaaaatcaaactgttattattcatgtatcctacatcttactgcatgctaactagaagtatcaaatactgatagtaagaagggaaaggtcctagctagtatttttaggtgagagtttgaggtaaagatgggggcatgctatcacatagggtttcttgtatatctatcaagaccctaggtttgtgattttgtgctgtcttatgtgcacagagactgatttgtaattgcagtggacttgtaacatactaatcttcctacccttttacattactgtagaaaaagcaaaacatagacctcctaaatggactaatactgattgtatctctaccacagactatcaagtaatctgccaacaaccatgaatttaaatgataatacttaagagactcatgtccaaaggataacaggagaagttttagcacaaaactatgatgaagggtctaacatgctggactgggtcctcttgacttacccagtgagcaatgatgtgaccttgggcaggcccctttacattgtgcaatgtcgaatagaagcgtgacggtggatggatcctggtctcgtatctaattccaagggaagcatttaacatttaattatgatgtatgttttttgtaggcatttggtacataccttttattatgttatgcaagtatttgctaagaggtgttttgtttggtggtttatttttagagacaggttctcgttttgtcacttaggctggagtgtagtggcgattatagctcactgcagccttgaactcctgggctcaagcaatcctcccacctcagcctttctgggtagctgggactgcagccaggcaccaccatgcctgactacttggcttgtttttaaaggatgaggattgaattttttctacagctaatgacgtgatctgatagtttttatgtaatcaagtttttttctcctctaacttgttagtgaggcaagttataacaacagattttctaaggtgctctagtgtaaaatcatgcttgcattcctggggtaaatcctaattcttcagttttcagtggtttcacttgactttttgctgagaacttccaaatatagctgccttcagcaggtatcggagtaactgtcctgttgagcaccaagcaacaacgtgtaccccatgagcagtgcattcatccactctaatgcttggcgaaaggtgaatattattaaaaaggatacaataagctatttacaaaaggggaaagtggtgccaaaccatcctatgatctaatagattccgtaaatctatgtaagtttcaagttaagattactcaagcaacccagataccgtcaaaagaacctataaaaagccttgaaaagtacttttttaaaaataggaggtaggtgtcttcctcaaacaataaatggaaaattggtaggatttctacactatcttgtaggctttttttcttctcatttctttttcttcattggtttgctgatttctttatttttttcaacttctctgatataccccatatgcatcttgatggccgcttaatctgtagtcacatgacatacttctgtacaactttgaggacgggtctgatttccacagaacccaaagccaccactcctatccttgccctagctagcaagcagcatggagttgtatgggattgttgtttttccagacaataacatgacccagctttaatttacttttttaccttttcagttgtttgggatcttggtttcaagttagaatatcttttctgggcttgaaacctagaagttttaaaagaaaattatctatttattcccgtgaggttgaagcttataggtggtatccttagaatcttagttctttctgcagaaacttcagtccgcttccagaagagtaaggagattataaataaccccttggcatgaatggtttgcgggagtcagcagaggtgaaatgactagtgttctgcttgtgtgggtcctagagccaaactgatttagagtggccagtggtcagagatggcagaaccagaatttgagggaaatatgtggcaaatagatgatcctgtagctgtgacattggaataggatgccttaaaggacttaagagatctggaaacctggtttaaacagtcaggtgggttggaagtgtatccaggtgatgtattgatatatgagaaactgccctcctgtcagcggcttgagccaggggacactccctccaccccggccccaagggtgggagattggctgtggctgcccatgatgcaggcccaggctgtggctggcagtgctgtggttctggacctcctgccaggggtacaggacagctcagcattgccaagcatcttggtccacctgttggcgacttggggcaggcatgtcacctggacatctgggtcctatggggagagggtttcccagagctttacctttacatctgattggtgagaactgcgtcacacagtgcccccaggccacctctcttgaaatcacagttgcagcctgattcttgaacaaaattgggattctgttaggaagaaacaaggtgggggtggcttttggtgggggatgggcacttgccccaccaggcctccactccctcaccttttcccacaaagtactcacagtgatctgatcatgtagcgccttccggtgctgcctggggcaccacatggcttcgcccagtgcccagctcccaccacacctccacttgcagtcccaccccacatccagccatattcccacccctccctccatgccaggcctggccgggccagtgactgtctggcagtcatgtttgctcagggggttttctcggcctgaagagaccccaccccattgaccattacctggtccctcctgaagctttccgcctcagttatggggtcttcagcgaggcattcagctctgcggggccctgtcccatggaacttcagactcatctcagtaaatgacattattgtcactcagccaaggtcactcatgggaatggcctgacccaccctggccctcagaggattcagatgtgcaggcaaaactctttggggccctgcagggaagctgagggaacctgctgcctgagtagccactggctgctgctggagaggtgggaaggttactgagctgaaaacatggagatttcagtcatcttcagctcacacataaggcatcccactggcaccaaatatcaactctggtgagcagaggcctgtggcttcatgctgggaaggaggcctgtcagcagctcctgtcaacagggcctgttttccagctcccctgggcaagccatgaggatgtggaagtcgaggaggcctgtggaggctgttggggagagccccacagctgttgcaccagtaagcctctgctcaaggggctgtggcctggggaaaattgccacaggcctcagcctggctgtgcagagccagtttagcattaggagcggaatcttctagagattaaactacaaagccagaatgcctgtgcagccttttattttgtgggatgtgataggcatgtggcccggaactcatggcatgtctgccaggtcctctcccgacacccccaggtctctgttcttgaagccccttgaaaaggggcagaagtttggtggagacagtcagatagtttgaggaagggtggtcttgccagttgggcagatccacagaacctgtggctccgaccccttgctcttacctgtgactccacagggggctgcttcccaatcctgcctgaccctgcttccctgcgatggacttgttttctcctggacacgttaatgccttttgtgaggtgaggcctaagcagtctcttcctttcacatgacctcaggactcatctgcgaacctggtgttgcccagcacttctctctccagtccgagttcttgggaagtacctgcgtggggccttgttgcttcgaaaggtccctaccagggtacagccactgcttctgaagcttgcctctgagttcctaaaggtgaaatacagatgtttaccctcatctttgagttttctaacagcctttctccactatacctgaagtgtaaataaactaacatttcctcctctcccttggtggagcagcattggccaaaataataataattcaactttaggccaataagaatgaactatggatgattatcagcagtgtctattcacaacagggctaagaaccgagcagagggagttttgcagtacccaagctagatgccagaacagaaacaccccactttcttactcattgaattagcccgttttcatgctgctgataaagacatacctgagactggaaagaaaaaaaggattaatgaacttaacagttccacttggctggggatgcctcacaatcatggtggaaggtgaaaggcacatctcacatggtggcagacaaaataagagagcttgtgcagggaaactcccccttatataatcatcagatctcgtgagacttatactgtcaggagaacagcacaggaaagacctgcctccctgattcaattacctcccactggggtccctcccacaacatgtgggaatacaagatgagatttaggtggggaggcagccagtctgtatcactcatggtaaatttactcaagctgtcattccaagtttatttccttttaaactatatgtaattttagcattgcaattccttccatctattaggtgttcagtaaatacttttcagacgaatgaatgaatgtcagagaaacttgcagcagaattgaggggctgctataattatattaatatgtttaaaaagtaaagtttattatattttaataacagcaactaatattttgggctatttgtatgtgctaagcagtctcagagcttttccatcatttaatcttatttatcttaattttatgctgttgattctgttgtctagtattttttcatttgagcaaacagaatgatttaagttattagtctaatggattgatgaaatgaagccagcattcaaagttgggtctgaccttagagctcttattcttttttttcttttctttttttttgagacatggtcttgctctgttgcccaggctggagtacagtggtgcgatcatagctctctgcagtctcaaattcctgggctccagtgatcctcccacctcagcttcccaagtagctggaattacaggtgtgcaacactatgcccaattttttatttttattttcatagagacaggatcttgctctgttgacaaggctgatctcaaacttatgatgatcctcccacacctcagtgcctcccaaagtgctgggattgcaggggtgagccaacgtacccagagctcttattataatcactgatttagactgctgcccagttacctgaaagcaaagaagagacagaaaaacacttaaagcagacctaagactaatagttgtcactgtcatcttaaggccaaagccctttgaagaaaaccacctttgaaagccttgttgaactaggagagttttacctgattgtaatacaatggagaaattcacagtgaaaacctgagtcatcaagaaatgttattttgtttgacctctacctgagtcttgaggggagagggggtgagttgacccctgagtgtatggggtggggactctgggaatgctgccagaagagaacagcaggtcctaaggccagaaagcctggccaccaaggaagtgatgcaggtagtttgtccttgttggagtgaacagggtggtcagtggaagtggcctggtggagacaccagccaagcagttaggattttatcctcaagacagtgggagtctctgaagaatttttttttttaaatagcagcttttattgagatatgatccatttaaatcacgtaagtctgtgggttttagtgtattcacacaattgtgcaaccatcactacaatcaattttagaacatttttatcaccccgtaaaaaaatcttaacccacagcagtcaccctccaagaccgcctccctcccagcccctggcaaccacaaatctatgttttggctctgtggacttgggtcttctggatgttttatacacatggaacccacgccctgcggcctcaagcagccctcccactttagcctcccagagtgctgaagagttctttctattctttggatacaaatcctttaccagataaatgatttgcaaatatttcctctcattctgtgggttatcttttcattgtcttgataatgccctttatggcacaaaattgtttaatttttatttttatgaagtcgaatttagttatttttctttggtggtttgtgcttttggtcggaggaattttaagagttatggaatcacatttactgttgagaaagatgacttgggccacagttaggtgagaaagaatgaaggacagaacagggagtgagttgggtgggaagatgagggctggaaagacattcattttatttacttatttatttttgagacggagtcttgctctgttatccaggctgagtgcagtggtgcatctcttcacgcactgcagcctccacctcctgggttcaagcgattctcctgcctcagcctcctgagtagctgggattacaggcacctgccaccacgcccagctaactttcctatttttagtagagacggggtttcaccatgttggccaggctggtctcaaacccctgaccttaagtgatccacccacctcaacctcccaaagtgctgggattacaggcgtgagccactgcacccggcctggaaagacatttagatgttagatgtgtagaagggaggctcagtagggtcaggtgactgatttgatgtcagggacgggcaggaggaaggcatttcagcctattcatagatctccagcttgtaggattgaatgtgcggttgtgctgcttcctgggagaggaaacacagaatgtggggcaggcttgagaagggagcgttatctgctggagctaacaaggatacccaggcctgcaagcccaggctgctgtcagcaactgccgatgcagccacagaggagatccgggagcctctgcccttccaggccaagagtcctccaaggccggggcctcgtgcctgaggtctctctttgcccctccagtacctttagaagctgtagaaatatgtctagacaggatgttccatgaatgcatttcacatatgctgaggtttgtgaggagcctccacagtgtcagaggaggttgcgactctgaagatgagcaggtgcgattctgaattcttgaccattctctgccctggtagatgatctctttttaagcactcgagaaaacttgattgaatggactatataatcactatataataaacagattaagtcaaaagccaagtaaaatgacagacttacacaagaggcagttatggggggtttatgagtcaggtatctttcttctccacttgttctgttttctaataaaactgtctgtacaactttaatgttactggaatttactcagaacttattatagtgatctcattctgtccatgtctctatagtaccatgtttttggcatgtaactatttgaatgaaagattaaatgatttctcatagccagggcataattcttcaagatactgtctttgctataaaaatttacaaaaaataactaacactgaaatgtttgagccgcattttgtctcacagaatgcttttacttgaatgtactgttttctttgttctttatatattgataatgttgggtaatctataaacctaattccttattctctttagtctacagtctctattcttatggctgctttgtgtaggagaagagcttggttcttagatatctctagcttgatttcctttctgcttttgttcatcacactaaagaaagctatatagatgccctgacagagatcttttttcagtattgtcaaattatctggtatcaaaaaacagaaacccttaagtaacttcacagcttctcacaagggcttgctgcataataacaggcagatatttttatattcactttacagattaacatatgaagagagggagaaattaaatcacttgaaaagaacaatccagcatgtatcaagtggctgagaccaaaccctacccttggtcaaaccatcacaaacagttgtttacccctccgagagaggagaatctagatgtgtgtgttgccaccagcataggagtgctcttaatatctgcagtcggggagagcatcccccccacccccaagcacttcctctttgcaggagcactcatctggagatgcccgaggcccattgcctttccttagggtgctggttaatgtctaatctaattctttgatccaagcttgtgaagtgacagtgattcttttggggagaggatggcaagtagcatgactcagcctccaggcttaactttatcttccgagtaaggagtttgggggtcctgagactttattttcctttacatgtgtctgacaagcatggtgtgggggtggggtgggtggaggaggtgacccttgataggattctagaggggtctgacttcagagctgcctgcttatcctctgggccctgcgtaggaacctctgctgccatatgccttgggcacctgatggaaaggagtggctttctctgtcctctctgcaggaacccttcttgggaagtttgtttgactctatttatagtgcaattccactggctccatatctacagaaagttgatctttgaaattgagagatgcatgagagtgattccttttttcaagggaaacgttgaaaatcacattgctgggtgtctaagagtgtgattcttgacctagagaagttaaactctaaggagctggccagtcagacatgttgggtggtctccctgtagttccagcttcagagggctgaggcaggaggatcacttgagccccggagttcagcctaagcaacatagcgagaccccatgtcttaaaaaaaagaaaaaaaaatctcaagggaaatgcaaaggagctggccagcagagagaccagcaatgtgaatagggcctggatcccctgcagtcgtggaagggtaggctttggtctcagccacttgatacatgctggattactcttttcaagtgatttaatttctccctctcttcatatgttattctgtaaaatgaatataaaaatatctgcctgttattatgtagcaagcccttgtgagaagttgtgaaatgacttaagggtttcagtttttttattgtgtgtgtgtgtgtgtgttttttttttcttgtaaatagctttctggaatatattgttaaacttgagatagttattccaacatccaagaaggatgtagtgatgtgtgcatgtgaaacaactgctgatttgcaggtcccctcccccatgccgagttacctagcttgtaacttggcgcagagcctttgagggacagcagcctcacctgcaagcagaggctttgctcagggtgctcgacctctaggctgcctcgttacatcctcagtttaattcctggcccacagttgtcccagccaaaccacatgcatgtttctagactccaggtgacaggcccttagcctgaggactctacaacatgcagccaggtagttatgcagaaggccacagtctgccccaggatgcaagactcaaaagccaccttctattgctgcttttcaaatgatttcagacatcagccttccaggatctaaaatgcattacttcttttctccttaaattcatcttctggccaggcacagcagctcatgcctgtaatcccagcacttgggaggccaagatgggaggatcacttaagcccgggagcctgggcaacatagcaagaccccacctataaaaaaaaaatgaactgggcattgtgatgcacacctatagtcctggctctgagggaggccgaagtggggagaatggcttgagccaggagatagaggctgcaatgacccgtgatcgtgccactgtgctccagcctgggcaacagagcaagaccttgtcccttgactccaaaaaaactaaaaaatagtaaagtcagcttctgtttaataaagtagctattgctaagtatatattggtctttcatgtattgtgatttttcttggtcaaactgacctgtattatattactacctagtgttgtatatataatacatagggcaattgtgagagaaagaatgactttcattgacttttactgttacatgttccaggcactatgataaactctccaagtcattatttcacttaactgcccaccccccaaccctgcattgttagattatgaaacagaggcagagggattaaggaatacaaggcttgattcactagaattggggtttaaaccctggcggtctggctccagaatatatgtccttagtcatcttgatgcatttaagcagctttcaagcttcagagcacaacctgcaatgatctattttgtattacaatccagagtctcacgcctttataattaaaacacaagcttcacagagcagtgctgacccctgagcacaggcagggctctctggctgtttcccaggctgtttctctctctcttctcctgtcctttccctccgtcccttcctcccccctcccttattctttttttctaatttttaattgttatgggtacatagtaggtatatatatttatggggtacctgagatattttgacacaggtatgcaatgctgtagtcaccctgttgtgctgtcaaataataggttttattaactatattgtatccattaaccatccctgtttccacccctgccccaccacccttcccagcctctggtaatcattctactctctatcttcatgagttcaattgttttaatttttaactcccacaaatgagtgagaatatatgaatttatctttctatgtctggcttatttcacttaacataatgatttccagttccatccatgttgttgcaaatagcaggatctcattcttttttatggctgaatactctgttgtgtatatggactatattttctttatccatttgtctgttgatggatacttaggttgattccaagtcttggctattgtaaatagtgctgcaataaacttggtgagtgcagatatctctttgatagactaatttcctttcttttgggtgtatacccagcagtgtgattgctggatcatatggtagttctatttttagtttttttgagggacttctgtactgttttccatagtggctgtactaatttactttcccgccaacagtgtacaagggtctgcttttctctgcatcttccccagcatttgtcattcatgacttttgaataaaagtcatgacttttggataaaagccattttaattggggtgagatggtatctcattgtagttttgacttgcatttgcatttctctgatgatcagtgacattcagtatgttttcatgtttctgtttgccatttgtatgtctttaaagaatgtctagtaagatcttttgcccactgtttaatcagactactagatttttttcccccattgaattgtttaagctccttatatattctggttattaattccttatcggatgggtagtttgcaagtattttctcccattctgtgggctgtctcttcactttgttgattgtttcctttgctgtgcagaagctttttaacttgatgtgatctcataggttcatttttgttttggtattctgtgcttttgggctattactcaagaaatcattgcccagatcaatgtcctggagagtttccccaatgttgttggttttttagtagttttcatagtttgaggtcttagatgtaagtctttaatccttttgatatgatttttgtatatggggggggtgtctagtttcattcttctgctcatggatatccagttttcctagcaccatttactgaagagactgtcttttcctcaatatatgttcttggcacctttgtcgaaaatgagttcatgtagatgtatggatttattcctggattctctattctatttcattattctatgtgtctgtttttatgccagtaccatgctgtttgggttactatggctctgtagtataatttgaagtcagataatgtgattcttccagttttgttctttttgctcaggatggctttggctattctgggtcttttgtggttccatatgacttttaggatttaaaaaaaattataaagaatgtcattggtattttgatagggattgctttgactgtttagattgctttgggtagtgtggacattttaacatattgacttatccagtctctacacatagagtgtctttatttttgtgtgtgtgttttcttccatttctggtgtcaatattttatagttttcattgtagagatctttcacttctttgattaagtttattcctactttattctactcacagctactataaatgggattactttcttgattcctttttcagattgttcactgttggcatataaaaatgctactgatttttgcatgttgattttgtatcctgcaacttcactgaatttatcagttcttaatagttttttttttttttttttttgtggaggctagttttttccagatatcaagtcatatcatctgcaaaccaggataatttgacttcttcctttccaatttggatgccctttatttctttcccttgtctgattgctttagctgggacttccagtactgtgtgtgaataacagtggtgacagtgggcatccttatcctgttccagatcttagaggaaaagctttcagtttttctccattcatatgatactaggtgtgggtctgttgtatatggcttttattatgttgagatatgttccttctgtacccagtttattgacagtttttatcatgaagggatgttgcattttctcaaatgttttttcagcatcagttgaaatgaccatatggtttttacctttcatttggttgataccacattgcatatgtcaaaccacctttgcatccctaggataaatcccacttggtcatgatgaataatcttttaaatattttgttgaatttggtttgctaggattttgttgaggatttttgcatcaatgttcaccagggatattggcctatagttttctttttttcatgtatctttctttgtctggttttgttatcaggataatactgctttcagaattggtttggaaacattcccttctcttctatttcttggaatagtttgaataggattggtatttttctttaaatgtttggtaaatttcagcagtgaaaccattgggtcctgggcatttctttgctgggggactttttattctggcttttatctcgttacttgttaccggtctgttcaggttttggatttcttcatgattcaatcttgttaggttgtatgtgtctaggaatttatccatttcttctaggttttccaatttattggcatatagttgctcatagtagtctctaatgatcctttgaatttcggtagtattggttgcaatatctccttttttatctttgattttatttaattgggtcttctctttttcatagtctggccaaagttttgtcaattttgtttatcttttcaaaaaccaactttttgtttgttgatcttttgtatttttttcattaaaatttcatttatttctgctttgatctttattgtttcttctcattttgggtttcatttgctcttgcttttctggttatttaagatgcattgtttgtttatttgaagtttttctctgtttttgatgtaggcgctgattgctgtaagatttcctcttagtactgcttttgctgtatctcataagctttggtatgttgtgtttccattttcatttgttttaagacattttaattttttcttcttaattccttcattgacccactggtcattcaggagtgtattacttaatttccatgtattcgtataatttccaaagttcctctttgtgatttctagttttattccatggtggtcagagaagatacctgatatgatttcagtttttttttttttttttaagttttaggagttacagggccaggcgtggtggttcaagcctgtaatcccagcgctttgggaggccgaggcgggcacatcacctgaggtcaggagtttgagaccagcctggccaacatggagaaaccctgtctctactaaaaatacaaaattagctgggtgtggtggcatgcacctgtagtcccagctacttgggagactgagacaggaaaattgcttgaacccaggaggcggaggttgcaagtgaagcgagatcgcaccaccacactccagcctgggagacagagcgagattgtgtctcgaaaaaaaaaagtttcaggaattattttgtggcctaacatgtggtctctccttgagaagaatcatgtgctgaggaaaagagtgtgtattctgcagccattagatgaaatgttctgtaaaggtctgttagttccatttgttttgttttatagtgcagattaagtctgatatttctttgttgattttctgtcttattaactttttgttgttgtctgttgtttctatttacagcttattataccatgtcttgaaaagttgtagttatttctcttgatagattcatcttttagtctttctgtttaagatacgagtagttgacacatcacaattagtgttaaaatattctgtatttgtctgtgtacttgctgttaccaatgagttttgtatgttcagatgatttctttttgtttgttaatgtccttttctttcagatcaaagaactcccatttgcatttcttgtctgctgttgatgaaatttcttaggttttgtttgtctgggaaagtctctatttctctgtcatgtttgacattttttccttcagtactttaaatatggcatgcctctctctccctggcctgtaaggtttccactgagaagtctgctcctttgtttcttttttcttgctgcttctaggatcttttcattatctttgccttttgggaatttgtttattaaaatgtcttacttgggcaaagtctgcttggtgttctataacctattgtacttgagtattaatatttttctctagatttgggaagttctctgttgttatccctttgaataaactttctaccccaatctctctctctacctcctctttaaagccaataacttactagatttgcgctttttttagactgttttgtagatcttgtatgtgtgctttattttttttaaattttgtctcctctgtatattttcaattagcctgtcttcaagctcactaatttttcttctgtttggtcagttctgctgttgagactctgatgcattcttcagtatgtcataaacttttagctccataatttctgctttatttttaaaaaattatttcaatctcggccgggtgcggtggctcatgcctgtaatcccagcactttgggaggccggagtgggcagatcacgaggtcaggagtttgagaccagcctgaccaacatggtgaaacccgtctctactaaaaatacaaaaattagccgggcgtggtagcgcctgcctgtaatcccagctactcaggaggctgaggcaggagaatcgcttgaacctgggaggcagaggttgcagtgagccgagaaagtaccactgcactccagcctgggcgacagagcaagactttgtctcaaaaaaaaaaaaaaattatttcaatctctttattaaatatatcgaaaggattctaaattctttcgctgtgttatcttgaatttcattgagcttcctcaaaacagctattttgaattttctgtctgaaagatcacatctctgtcactctgggattggtcactggtgtcttatttacttcatttgatgaggtcatgttttactggatggtcttgatgcttgtggatgttcatagatgtctgggcatggaagagtccggtatttattcagtcttcacagtctgggcttgtttgtacttgtctttcttgagaagactttccagatattcaaagggaattgagtgttaggatctaagcctttggtcactgcagctgtgtccgcattagggggcaccacaagcccagtaatgctgtgattcttgcagactcattgaggtatcaccttggtgatcctagataagatctaggagaatttcccggtttatgaggcagagtctcttgttccttttccttactttcccctaaacacacagagtctctctcttcatgctgagctgcctggagttggagcaggggtgatgcacttctgtggctaccactactgggactgtgctgggtcagacctgaagccagcccagcactgggtctcagtcaaaacttgtggtgactattgcctggctactgctgatgtttattcaaggcccaagggccgtttaattagcagatggggaatctagccaggcttgtatctttcccttcagggtgatgggttcccttctagcccagagtgggtctagaaatgctacttgggagctggggcctggagtcagcagctttagcagtctgcttggttctttattttattgtggctgagctggtatccaagttggaagacaaagccctttacccttccctctccttttctcaagccaaagggatctctgccagtggccaccgccaccccaagcctgtggcagcaccactgatgtttattcagggcccaagttctctttagtcagcaggtctggatctctcccttcaggtccacggtgggtctagaaatgctgtccaggaactaaggcctagatgggggactttaggagcctgcttggtgctttattttactgtggctgagctgtgcccaagttgcaagatgaagtcccctttactcttccctctgctttcctcaagcagaagggatctctccctgtggccaccacagctgggaatgcactgggtcacacctgaagccggtacagtgtgtggcccatgatgagtactgtgtgggtaccactgatgtttaatcaaagcccaaggactctttggtcagcaggtgatgaatgctgccaggactgggtccttcctttcatgacagtgggtttccttctggtccaggctatgtctagaaatgttatctgggagctaggacccggaatgggggcttcaggaatctgcttagtgctttattttactgtggctgagctggtatccaagttgcaagacaaagtcctctttactcttccctctccgcccagagctgtgagctgtgctgcctggggttgggggaagagtggtgcaagcactcccttggctgctccaggtggtgtctcactgggtcatgtgcactccaagtccactgtctgagcccagcacagcaccaggacttgcccagaaattgcagcccttgtggcctagcctctttcagatttacttaggactccaaagtgctttagcccacagaggtagggcttgccagaactcagattctcactggaatggaagattcccctctggctagggctggtctaaatgctccttttatgggtgctggctgaattctgtcctgtgttgctttctgctgtgatgggacagcaccaaattccaatgcaatctcacaatcattgtgctttccctcccccggggtgcacagatgctgtctctctaccatgtggttgctgccaagggatgagggagaggggatgttggagagtcaagacggtctttcctcccctctccggtgcatctttccttgatatgatgtgttaaaaccaggcactgtgatcgttcatctgatttttggttcttatgaagatgctttcttacgtggatagcagttccatttggtgttcctgcagggaagccattgctggaggatcctttttggccatgttgttctgtctccaggtctctcctcctttccttatcctttgtcacaatttcccagtgaatgatcctgcagtgctgcctcccagtgttcattcaatcattcatcaaatattcattaaatgcctcctgtgtgtgatgctgtgtagatactaggggtgcaatggtgaattaaacagacaaggtccctattcccatagagcttatagccagaaggttttgcacatgaaatgtaattggaaaaaaatttcatttcatacaaagaaaccccacccccagcgccagattacctggtaaatatacagctatttagtaatgttaattaaaggactgtagaaaagggacaatgatgtttattgcagcatttttgtaataataaaataatatagtcaaacagtggaatactatgcaccaattaaagtaatgacttagcatgatgtgtatcagtgtggatacatttcaaaaacacagttaaaatgcaggagcatagtaagcatagtattgtagaggacaaagcatattaccatgttataaatgcagaataatacagatacagtataatccactgcaaaagcacaatatagtgtagcattgtgtaaaaggacaatactatgtattgtcatggacacatgcatatatagtaaaagtgaaaaaccattcaaggattgaccacataccaattttaggataatgcttattactctctgaggtaggagggaagattgaggttttaaaaaattcttattaaagtaaaaagattttgcaaatgtgacaacatttaaccattgttaagtctgtttggtgcatgattattatttttggtgcttttctgtgtatttaaaatgtttaacaattaaaaaattgaacagatgaagcgattgtgccgtgccacttttctgcttctgtgtatgtacgtttttgtgtgccttccgccgacattctctatcacatttttgctgtgatagagcatgaatgtgatagagaatctttagagtttcctctaaagaagcattgcagccccaagtatcttatctctaagggaacctgggggtgtgcagattagcctggcttcagggttgttgttcacagctcagcagcagagggcgctgctccatagcagatgtgcggtgggggtggccacaccaggcagctctcttggtgcagggccagtgcctcccagggaagcactgctctcccagggaagcactgctctccccagctgtgggaaagaggaatatttaagtacgtgcagattccctcctgcttgtaggagggggcacagaatccagccatttggaagcatacatcgtgtttctctgactattcacagccttggctgtttctgaggctaagaatgcaagaaacagcacatgccaagggcgtctttgctactatgtccgtgagcctgctgctgacttgtggggagcttttcgtaatgttttattttagattgaagaggttcatgttcaggtttgttacatgggtatattgcatcatggtggggcttggccttctagtgtacagatcactgtgggaatttttttgttgttaactgaccaaggaaccttccttttattttaggtggaaaaggattattcatacctgaaggagatatgtgatcaccaagccgaacagctgagcagaaccagcctaaagctgcaagaaaaagcatcagagagtgatgcagagatcaaagacatgaaagaaaccatatttgaattggaagatcaggtggaacagcaccgggctgtcaagttacacaataatcaactcatcagtgagctagaaagtaagtggggtctgccaggcatggtggctcacacctataatcccagcactttgggaggctgaggcaggaggatcacctgaggtcagaagttcgagacccagcctgaccaacatggtgaaaccctgtctctactaaaaatacaaaattagccgggcgtggtggtgggcgcctgtaatcccagctactcaggaggctgaggcaggagaatcacttgaacgcaggaggcggaggttgcagtgagccgagattgcgccactgcaaaagaaagcaaatgaggtcaagcccaggagaaatgtggaatggagctgagtaggacactaaagaaaccagcagcagtgggtgacgagggggggtgggtttgactgtatgttggctggggtttatgaagtctctcatttgagtgcgctgtaatctcctaggaagaatgtcacctaagaaacaatcattaatctccagtttaaaaactagagattaagagatcaatgatcatagcagttgaaaactgggatgacagaagaacaggctgttgaacatgagtcagcagtgtgtaggtgattgcgaaaaatagaaatgcttttcattttgttttttttaagaagtcttgctctatcaccctggctggagtgcagtggtgcagttgtagctcactgcagcctcaaactcctgggctcaggtgatcctcctggcctctcaaagcactgggattacaggtgtgagccaccgtattgagctgcaaatgttttttggctgtgctggatgtgttttgtgtgagccatgctactgctgctgtctccaggcagcctgatcagcttgaaggccacatgttaggatactttagctgtgactgtgagagttcacagggacccttcctaaggatattttgcagggtaggagaaggttattcagaagaaattgcttgccagtcatcaagtactgacactgtgttatctcttgtatctgacagagatggatgataggtatcagagtggatgaacaatgtgtgctcttggtctaagggagaaaacaattcccgcatgtgtcccattggtggtaggatatcaagtaacttctagatgtttgccacttagttgctgaagagacatcagcatatggcttatttatgaactcatagtttgctttgaattgggaaagaaatttttaaaagagattaaacattaccttctttgtccaaataagccttaccaaattatcacatctaatgtgttttcttttgtaacaaaagatttaatgcacaaagcatttagtcacaccagccattactaagaatagcttggtcagttgcctgagaagttccttaccccatgcagtcgatcctccttattcacagatttcacattggtgaattcatctgcttgataaaacgtattttaaccccaaaaccaatacacagagcacttccacagtcattttcagacatgcacagagaagtgaaaaggttgtgtcatccagtgcttatgttcccaactcgggtcagacagagacacttggccttctcatactgtacatgtgtcttttttacagtctgcttaataccatgcttttaacatttttgtgcttttgtttttggtgactttgctatttaaaatggccctgagtgcagtgctgtccactgtccccaagcacagtgaggttgagacgcacctacagagaaaacacgtgtattagggaagcttcatgcagacgcaagctcttgtcccgttgtgcgtgagttcggtgttattgaatcaacaaagcgcatcaggctaagtgcagtgacctcatccctgtaatctcagcactttgggagactgaggcaggaggatcgattgagcccaggagttcgagaccagcctgggcaacatagtgagaccctgtcttgacaaaaaaataaaataaaataaaaactagccacgtgtggtggcgcatgcctttagtcccagcttctctggaggctgaggtgggaggatcccttgagcctgaaaggctgagactgcagtgaaccaagattgtgccactgcactccagcctgggcaatagagcaagactgcatctctaaaaaaataaaaaaaccaaaccaaacaaaaaagcccaatacggtgcatcagagaaagggagaagtttgacaatatgtatataaggctgccctgagacatgctaaagcgatgtgctaaagcagccaaattcatggatttgtgagatgacagccagttttaaaaagctgtgggcaatattgttgtgtggctgaaaaccaaagcaatatttgttcacatcacccagggtcaggaaaatgttaaccccttcttggctagtgctggttggctcccaagtttcaaaaggccataaagtgtgagaaaggttaaccttgcaggcaggggaggttctgcagatcaggaggctgaagaagaatttaaaaatacttgctaagtgttattcaggaagaggaaaaaaggaaagagtgggtttccatggttgatgagcctggcttgtttatagagacattggcagatacgtctatataatgcaaatggcattttagttgatgagaatgttgtgaccagaggcttgcaggaacctaacctgtatttttcctagagacaatagttcggtgtttgctgatttggtgtgcatggcaactctctgcaactaccatgattattagaattgactatgtatttcagacattgactagttggttagagtgacagttgacagcacctgccccatttctccttgaacatgacatgtagtagaactgcagaacctcagcgttcagtgtcagtgccatccaggctgttctcaggatacaactgaaaacctggacgccatcatcatcagtgtatccttccaaacccagcaccatgattgagaagaaaagtcaagacaagttctgttttgtttttgtttttgtgatattttgctgttgaaaatagggttgtattgtccctaaatccttaaaagtcagcacagacacactaagaaaaccagtgtataattaatgtccacagcaaaatttagacacatgcctgtggttatatcatcatatatccaagactgacaacaatgcaagccatcttttgaaaaacttttaaactttttaaaaggatattgaggtattgttaagatatgtttttgcacagagacctagggacacataaatccagcctagaccaatcacttcttcctataagatcctgatgggaaaggaatggactggaaaataaaaggaagttagggagtgttttctactgtgcagcattgattccagacacaaactctcagtcccactagaactagaactgctggggtaggacctgcccacagcatctttttagcctactctggtgattctgatttgcatccttcatagaaagctaatgctctaggttagagcatgaggacctattgaggaatttcagctcagtgactgacaccatcagatttaaatttgaatgactctgatagccagatggagagaattggaggcaaggagaacaaggggctgcaggtgtccttaagtagggagaggcaggcaaccacctgggaagatgttaaatgcacacatccccgggttctgtctgcccttggagattctgcctccaggtgtctggagtgtgggactagaacatcggtgcttttgaaaagcttcaccagtgatttagaggcttaactgtgattgagacccatgactctagaaagtgctttacaaatcacaggaggaataagcattcatgtgctctgttatgtgaaagcctctatctcacagcaataaaggacacttaggacgattgtgtgtgagtgcgagggaggccggactcggtatgcaagtgtgcatggccatggaggcctcttcccgtagtgctgctatttggttgtgcattctgtctgctgagactgtaacctcaatacacatcacatattttccagatcatcctgttctttatctcagaggaggctcttgtgtccattccctggtttacagggtaaattgaaattgctaaaagttgcatttagagtagaatggatggatttggatgcctgttgtggcatctggagctgcccctttctttgctacctagcgtgtcttctcttaagagtctcacagcttttctaagccctgtctgaattatttatttctaggtagtgtgatcaagctggaggaacagaagtcagacctggagaggcagctgaagactctgaccaagcagatgaaggtgagatgcgggtgggagccttcaccaccatcttcctatgaattacccgctccgaggtgtggatcactctctctatcctgctttctcttggaacgtttccacggcatggtgggccctggaactgtaaattcttgttggcaggaagtaaaatcaaaggagtcatttggtgtcaggatggagaattctcataacctgaaggtgtaattccaccagtgccttttcctagcagtgagccaccgtgtaagcagggcctcaccaagcactgatggcatttttttcttggtgaccaacacggggactctggggtccctgcccaggcactggccctggcaggcgtctgacataaggatgggctctgacattttcaggaggagaccgaggaatggaggcggttccaggcggatctgcagaccgcagtggtggtggccaatgacatcaagtgtgaggcccagcaggagctgcgcaccgtgaagaggaaactgctggaggaggaggagaagaatgcccggttgcagaaggagctgggggatgtgcagggccacggcagggtggtcaccagcagagccgcccctccgtgagtctggtgggcaccagggccgtgcttgcttctcaatcactatgtatggggctccctggtggggatgggactcttcatgtctgtgccaggttctgctatttcctttctgagatcaccctgaattactagcaccaccttaccactaggaacattctgtacagtacccagtccctgccatgctgcagcataagaggctgctaagctcctcacttacatatgaagggccagttctagccaagtatcctgctaggcttaaagaatagaagtcctgtctagaatgctccctgaatcttagtatttattaatgcaggggagtgcacactaataaatacgaatccaccaccttgtacaggtcactcccatgcagtgggagaagctggaatcactcccaaggggaggagccgccggagaaggacacattcctctgggcccaaggatgtgcctgcttattgagaacacccatgagctacgtcaaaaggccttgacataacctattttattaaaaaaggatgagagtagaaaacatgcatttggctgatgtgtgacattcccttctgctcttgatggggagaagcacacagtgtatcagcccagggagctctactaacagtgacatttaagaggaaggtattcccaaagtgaatgcaatgttaattattatctgaaatttagatggtttacagacaaatttataaacagcattttttgctttagctaatattatatttacccaatgaggaatcagtgtccttaactttgagattcttggatattaggaaatgattttgaatttttaggtgtctctcaaatatcaaacatagtctttttagatcaaatttcctgggttttgaatgttgatcaggtggccctagtgtttacatgtttccaagatcagtggctagctcctgagccttttgatctgatgtttggttatcatgaatttcatgacattggaaagaggagatttttcagaattcagctgtgattctcctgtcaattctgctccaagtaattccttatttctttgtttataacttttacataaaatggcctttggggaaggatgaagatcagatatagctagctccacaattcactgttgaaaaatcaatatcgagatcattattttatttagttatttatttttagagatgggggtctcactatgttgcccaggctggactcgaactactgagcccaggagattcttctgcctcagccttctgactaactaggactacacatgcgccagacaaggtcattactttatagacagagctctccctctggacaccaaaggatgtgaattttaagtggaggtagagggagaataggaaaactaggtttcacagtgttccctactgaaacagtagtgaggccgttctgggtggcctctgtgtctgcttttgtttcgtttgcctctgtcttgcttccctattgtctgtcattggaagaaaatccgagtcagaacttgtgttgcttcacatgtacgttattttaatgataaatggtaaaagacaagtcctgagtttctatggtggccctgaataggttcttgtatgagatgctgtgtttcttacgtatactctgagacacaggccaggttcttctatgagatgccatgtttcttatgtatattctgagacacaggccagaccatgcagcgtgaaccctgatattctaggaaatctccgcatacgtcctgccagtttaggactccctatgctgcatcctgcatcttcaatcttaacgtcacgtttttttttaagcacagaatgtttcttttttgattttccagtgatttgcaaacctacctcccaatctaacagtttaatcccttctcaaaaaacatttcaaaattttagaatggacaccaatgagaacatgtcatggtactgaaatcaggcatcagaacgtttctgtctgtcagtgcatttggcaggaagtcagacaagtgccggagatgctggtttcttgtctgattttgcacttctctggcaagctgccccttgtaaagagttgactatatggcagttagttgctggtggttcagccacttccagcacctaccccatgagcaagacttgaaaccaactcacaccctcaaagctccggaagccacctagtgtttccatcttgactgaatgagttcttgattgaaactcagtttgactttgacagtcatctagtgagaactcaaaagtcattcttggttcagccacagccaaagaacttgcagagcattctctgacgaggtcctcaaggacaactgagagaaggtaagatcacccaaaaagcacctggatccagacatgagattacctggttcttaagctctgtttgcgtccgtgggcactcacagggttggttgcagccaggctgataagcacgagatgaagcacctgggcagaaatgcaaaccagcattcattgctggaactcagtaactaaacagtgggatattatctaactcatccatgatcttcggtcctgttacactttcacagatatttttatttcagagtcagaataactgatgttaaggtatgtggggaaggaaggcggtagcctcatctttgcagtcaaccagcaatatctcattcccagtgtcatgtttgcagccaaccagtaacatctcattctcagccctgcctcttgcctctgttaaaagaggtgggaagagggggtcgtttttgaggtctctttaagctctgctgttctctggactggttggttagctgacctttccctggtgggagagtaagaaactccagtgccagccttagagttattctggtgcaatgccttgaacctctttgacacagtggcatctccatatcttagttgtggcttgggagcctgctctttctcttccagaaatgtgaacaagccagtgtgtttttagggacctaaaagtgatctgtttcattggacacatataatgtaatagatgaaaagataataactttttcagctctggctcctcccagttttgaaaactaccaattgagaaaaaggctttgaaatgaaaactctcactgaaatgaacccgtcacatctttttcctgaaaagttgagtcctgggacctggcaaaaacagaaaaaacacaggcagctcaatgtaatgatatattgtgccgcatacaagctttctaatgaaagacatggttcgtgagcagtgcatggcacaggcttctcaagcagcatcagggaaagacctctgtgtttgtggcatttgttcctcttgttctgaaacagcaaatgccattacttttagggtgacttatctgattcttactgtgtctgtcatataacaccaataaacatccatggaaaacgtctttaaaagagataattaaacacacttaatatctgtgcctaattaatgctgttggtttctaaatagaatgtctgtgattcgaatgtgtttcattttgcctataccacaagttcttgcattgtcccctcttggaggtgagcagtgtggcagcgcagcacgtgcagactccactggaattggcttaactccatgtgtgcacatccgtgtcagcctgagtgtcactgtgtgtgcctgtgctgccctctgtgttgctctgatggctctaatgggtcacagccgctcagcatgtgttctccagctaccatggagaggggaggggcggaagttggaggtatagattctttaaggtcccttttccagctgtcttgccacagatgctctgatactgagcccctctcccaggtggaggggggctgttctcctgaggattcttaagcagtttctgaacagacctcaccttagcacccatgacggcatgatggacaggggtctccagcatttaatttggcccttgatgcagaacctggtcctctcaatgtgctcttattccagctagcattatctgttccctcacctagtactctttttttcatagtttaaatgtacatttatgacattagacacacagtctataattctaaagagctgtgtctgcctccctgttctctgacccctgattttacagatttcaacaatgtggacataagcttcccttaggcctttaggatttttaggttgcagttataaaagcaagaaggtttttggccttgacagtagagagaagcatgagcctctgtaaattctggaggggcctatggtgttcatcctggacatctctgcttcaccacacagttctttgctggagaagttctggtggaggagcctagtacaggcatttgcagtctggctttttttttttttttttttatgtctgaaaacctttggcttccaaaaaattggaacagtaggacttaaaatctgttggcctatcctggacattagcttttccctgtgggacagtgtaagctggaaattcttgcgtttgtgaactaagactgtattgccttaggtaactcctttacagcctctccctcccgtttctattttcacagctccctgggctctgtcagctagcagagcatttggtggaagaaagacagcccagctcttgccatgattgggagccgcagccatctctagatgaaagggggaatgtgtagaggagaaattgcctctttataaagagcccagttgtctccttgtgacattctctgtttctcagagtcattgccgtcgagtctctgctttttgtccacattttgggatcagcttactgcatgatcaaagatgatgtttccctctttttacttttcctcagaagattgagctgtcttttatttggagaataaaatgaagttctgaaaaaaacaaagtacaagtcttatgaaaagttatttgcagctggagtgctgaaaagggcacagtggcagagcagatgcagagctgggtacagcgcaggcccgagttcttttgttttttgttgttgttgttgttgttgttttgttttgttttttttttttttttgagacagagtttcactcttgttgcccaggctggagtgcaatggtacgatctcggctcactgcaacctctgcctcccgggttcaagtgattctcttgcctcagccttccaagtagctggaattacaggcgcctgccaccacacccagctaatttttgtattgttagtagagatggggtttcaccgtgttggccaggctgctcttgaactcctgacctcaggtgatccccacctcagcctcccaaagtgctgggattacagacatgagccaccgcacccagaacctaaggcccaagttctactttttggtgttcatttctctgcttccttttgatcgtggtgtctgatcatcttggaattcacattactcaaggcaaaataggaagccatctgcgtgatgtcacattccgaagaagtcagaaggttcggcgagttggagctttactcttgttgcccaggctagagtgcagtggtgcgatcttggctcattgcaagctccgcttcctgggtttaagctattctcctgccttggcctcccaagtagctgggattacaggcatgtgccgtcactcctggctaattttgtatttttagtagagatgcaatttcaccatgttggtcaggctggtctcgaactcctgacctcaagtgatctggccgcctcagcctcccaaagtgctgggattacaggcttgagaccccatgtctggccccttctgtggggtcttgattgagccccttcacttggagtctgacttcattacctcgtctgaaacaaggtgcctccaagctttgggttgatttccagaatcttgttgggttaaacataagtagaagtttgatcataaaggatgttattaagccggataggtaagcacggtgacaatggcaatagaaatctaatggaaaacgattgaatgacaactacaccaaagtttcatggatgaaactcaccccagaaacttagtgttcaaatcagagtgatacacaattcaaaatgtgattttaaacttctggaaatatgtgtgtttgtgaagatccaaatccaattcagcaacctccatcaggcagaaaccttctgcaatcctcacatgaggaactggttcacagtgtacacagcatggagccattagtgacgttatccaaaggatgagacaagacaaaagttactgtctaataaaaggaaaattaggaacaggaatgctctttaaactcaggaagatcttttggggtgtcaaactggacagcacagaatcattagaaaaattagcttggcgtgagaagagacattgaggtcttctctgtaaaatttacttagatacttgtgaataggactgaaatttatattttgggcactctttacctcagattcagagttcttaggattatttaaaattcatttgctggatgttttcaagtataaacaataagaaaactgcaacttcaacttaaaaggcactgctgtatttgcaccctatattttgacctgtcgttaggtactgttgaatatttttatctgtaagcatttatgaagtgcaaaataaacatgttattatatagaagcgtctgctgcttagttttaatcaccagctacgtttctgcagggcctttatgtcgttttgttctacatttttttctgaatacagtttcagaacttcaaagtcacatcaagtaactagaatttgaggtagaaaaaagctggatgtaagttgtaaataggaggttgacatggaatatgaacagtttcattagtagaacaaaagggcatggagtaaaaatgctaattttgcataaatttttaaaactctagggtctcagaaaatatagcatggacttaaagtctagatgtgttttgttgacatttaaatatgaatagattgatgatttaatgtattggattttttcttaattatgaagtattatttaggtatactaataacaaaatggagacgtgtgaagaaaaatattaatctttcttctccctcagtaccacctgtgaggaaatcagtgttaacagtgtgtacatttttctttactcatgaatatgtatagggttcattttcatatttttaataaaaattggattatattcttttcagtactctgcacctttttattttatcatatcataggcatccttccaggtcaatacatagaaatctatcttattttaagagcaacatgaccttccataggaaggatatgtcctggaatattaaaatattgtcttactaatgcacaacaaggttataattttttttttatgagtaatgctataatagcagtccttattcatatagtcctatgtagttgtggttttatttttatagaatgggtttttcaaaatactattgctgctctaaagtatatgcacatttttattttaatagatgtctccaattactcacctgagtgctgtgacatttcactcttgaacatgcccatctgtatacatcctgagcagtagtggagagccttgatcatatttttgccaataggataatcaaaaaatactatcttattagcactttaatttgcatttcgctgagttttttttttttttttttttttttttttttttaaagacagggcctcactctgtcacctaggctggagtgcagtggtacagtcatggctcactgcagcctcaacctcctggacttgagcagtcctcccaccccagcctcctgagtagctgggactacaggggcacaccaccatgtccagctaattttttttttttttttttttttttttttttttggtagacacgaggtctcactgtgttgcacagagagactggtatcgaactcctgggctcaagtgatcctcccaactcagcctcccaaagtgcagggattacagccatgagccaccatgcccagccctttctaagcacatctttgtatgtttactaaccactgcattttctcttctaagaattactagttttgcaacttttccctgctttttcactgagctgattgtttttttctcatcagcttataagtcagtattttattagggatacggttgtatcccctatattatgagcctttatcatatttttcatgtgatatggctttatctttatcatagaaaattttatatttttatgtaaactgttagtgttttcctttactcttttttttaagattccttctccccagtattatacaaatgtgctattaaatgtcttcatctacttgatgcacacacatatgcaggccatttgatccacctctctttatttaatctgatgtgaggtgtggttctttttctcccactgggtagcactgtttattaccagagtcatcctttgtccactgaattgaaatcccacctttacatggtttatgtcatccacattcagagagacctgccctagatgtgctcccatttctttctcttttgagttagctctgctttaaaatattcatagattattagattgcttatattacttttaactcatcctttcatttaaaatttttattttattgaattttaaggcagacagtatcagtgttgaactctgtttccagtcatgaatttacaaacgccagtcctctcttgagtgcagtttccccttcactttgtattatgaactgtttgcatcgagcagggcatgattttgcctgtcaccttctcttgctgaagcagatccaggtgtggcagggcctgacgtttgccccaggtccgtgtctgaattctgctcagatccactgcctttgcctgacagtgcttctgatcttcttctcatgacttaaacgtgttgggaggctcttgaaggtacatttgtattacatacttggaggtacagaagcccaggtagagtagagaagggtgagtgcctagttgggaaattcacctgtacccagtttcttctctgcctggtgagcctggaacgcagagccagctctctggatctctttgcgtgcccctcatccattttaggtgcacactgtggctcttcctatcctgccccttgtcactactgccctttatgcctagggtaaaccaaccttggccttctcggatgtaaattcttcttgttcctgatcctttgccaaaacgccgtgcatctctctgggcttctcatgctcctctccagccttggccctctagggtgggggacattagttggggttttcccatatctccattttctttggaagggaattgagggaaagcccttggtattgtattttcattcccccgaccgtgtactctctattagcagaaattcttcagaatctaagccacgtcaatgatactcgactacaggacttttactatttgattcttattgttgggatttgtagattatgatgctggtgttcaaattactttcttatcctgtttgtttttattgttatatatgcttttactgaaatttgaaagtgaaatttagaagatattgtttgacacctaagagacaaagtacttcataatttctgtcttcaaatagagtgaaaaacttctgttagatttgttttatgcaaaataagtatttagaaaaaattacattccaggcaagggcatagaatgagcaaaggcacagaggcagggcataaaagtaaaaaacttcaggtgaatagtccaaaactagatgggcagaggggagtcttgggagattaactgaaagacctggggttgggctttgttcaggtgttcagtaaagagaccggcaggcgtgagcatgtggttgacatgcgacccgccctcttcacaaatattaatctgccaattgtgaaggtagcagtggtgccatacaacactacccaaatggagttaacctttgaatactttaaaaatcatcatgtacaggagctcacctgttcctggatcagaatgaacaatgacataaagtgctgtttttaggaagtaaatgctgtagaccatgactgacatttgaaaactctgttctctaacataacaaggaaagcagcaaattagagaggttaaataaaagttttaaagggaaataattagagacatgtatgtatatgtgcttaaatgacaaggtgaggcatggaaggcagaccgacattcagtgaggagggccatgtgccttgctgtgctccatggagacactgtctgcttatggagtgtgcatcacctgctgtgtgtgacacagcatcaggcggtctggcctgcaactgttgttctctagtatctggcctgcaactgttgttctctagtatgggttgccgccttttaagagcagattattgtataaagataggaacactgaaataacttggtagtattttttaaatgtacttaaaatttaggaagaaataccatcagtattatttctagaaccttgtatatctctcacagaacatttatgcattatagaaaatttgagaaatgcgtggccagagctggatttgcaccccagtttcaccattcatgaatcatgtgaccatggtcaaattttcctctaaaataagggataataatatctagttttgttgaaaattaaattagataatgcttttaagacacatggtactgtgcttggcatatacagtggagttatacacattcatatttgttttgctgaaattatcgattattatcccagttttatatgctgggagcaggtagaatacttgcttcatttttgttgttttaagcatggcccctaaacactaagcacctatttaatgtgtgatgtaactgaagaaagagccaatcatgaaatgctggagggaatgcaagtatgtgagacttctggagagttggtgtgtttgtaaacagtcatgtttacaaaagcatgtacttttgagtgactcaaattattttcatggtttatttgactacatgtgtgattattactttgcaggttgattttagaacctaacatcagccttagaggcagtagcaagccttgaacaagtgtttctccagtagtggtaccttgcagtttttcttttatttaatgctaagacatacctggctgtatacttacatatttcttaatattcattatagaatacagagtttttattcttccttggaacagaggaaatgtaagacttcatttatggctgaggctgttactaattgatcccagccaattctaaaataggctggtgtaaggattttcagcctcatttatgatttaagtacatactaataagccaatagcattcttaataaccattttctttggttattcaattcaggctatgttttgtgaatccctctcacatacacagagagacacacagacacacacacacataccactgttacataacacagtgggtatttctcttctcaaattatacagggttttctcatactgactcttattgttctggccaagtagacttagtgtttgaaataccatctttggatacctgaagcctgaggtaattgattcttgtggccttgctttttaaatttatcatttgatattttgaattgcagataaatttagataactgaaaggaataacctcagcagaatgtaggcgtctccattttgttcttattaaattatcaaagaatgaaatgtaaaatgaattatttaaaatgattgtccttgggggcctttggtactgagtcatttaaatggactggtaagaaggtggccaggcgcagtggctcatgcctgtaatcctggcactttgggaggccaaggcaggcagattgtctgagctcaggaggttgagaccagcctgggcaacatggcgaaaccccatctctactaaaaaaaaaaaatacgaaagattagcaaagtgtgctggtgcttgcctgtagtcccagcaagctacgcaggaggctgaggcattagaatcgcttgaacctgggaggtagaggttgcagtgagccaagatcacaccactgcactccagcctgggcgacagagcgagactctgtctcagaacaaaaaaaaggtggcccattttgtttgttgatgaccttcatgagaatggctagcacagaccgaggaaattattttctgctcaaacctaacctgatttctttttctttctgcatttttgccacctgattttattgtatgggaaagtatgaaaaccagttcctctcaataaaattatttaaaaattattttaaaaacccaacctcctacaatttctgaagtgcctgataatttcttccaatgaagttttcagtttactgattttttttttcactcataagaagggactgtggagtgaagattgtaaggcagtgtggtttaactgttttaagttctgtttctcttaaatttattctattcatgttatttacagagcaacagaagaaagcttagagaattaaagacaaattcaactggagaagcttatgagtagtagctagattaatttgaaaatgatcagtaaataactattttatttactgatttattttaaacttccaccgaccttattgaaatatacttccagaaacattctgtttgaactattatcataaattagtcatcttgcaaaacagctgtggcaatatgatacaatgaagagagcagtgatttagcaatgagaaggttgggagttcttgtcttggctccttcacagggagatcacatgacatgccaaagtcccctatatgaggaagccatgcattgagaggattgaggattgggtcaatgatctatcatagaatgctttctatgagtctagaagcctcatgaagaacacaccaggaaacttgggtgagagcaggagcttcacctcatgcagaattgcagtgtgattttagagtgctgttaccattcttatgcttagaagtcagagtgtctgaatcaggattctgttgtgtataatggattgcactctcgttggcttaggcagaaaggtgttaaatggtttgcagaattgttgggaaggctgagcttccaggagcagctcccaaagtctccacacacaactggaccaccagggaacctgctccctccaccaggacaggagccttaacttcagaaagctgcccacccagttggaaagctgccaccacagttgccagcaccatagcatcttgtctctgctacagtctctgtctacatagtgaatgcccggtgccctgcctctcttcctctgattcaggtcccactccaggtcttgcccaagtctttctgattggtggaacttaaatcacacccaaaatcccagctgtaggagagctgtgagatttcatctttccaaactctgtgtactgcatgggggttggagcacatgtcggcagccggtccactgcattcaccattgacagtaggtgaaatatttatggtcaataacatttgcattttttcacaaaaaatgcacaatttgcagagtagccatacacactttttatttagagctaatatcaagtcactctacatataaaaataattatttctgaccatttcccaagaaaacagctcttctaaaaattgagagcaatgcctacattatttcctaaagatgcaaactggtagagaaaacaggatgttaaattcagaatttcccttccagcttcatttattttctccacatcagttctgttttcctctgtgtctttttctcccatggggatgtcctccatcttttcaatctgatttgctctttgccatgcagacctgtggatgaagagccagagtcctctgaggtcgatgctgctggtcggtggcctggtgtctgtgttagcagaacatctccaacacccccagagtcggcaaccaccgttaagtcacttatcaagtcatttgacttgggacgcccaggtatttaatcattttttctataagcaaagctccaaattcaaactttggcccgacatttgatatgtctactatctctactccaccctggccctgtgttgttacaaccacaagggcgctttccaggtcctaccacgtgcagccactgcatgcaggagcctggctgaggctccagggaggcactgatggagagcctggctcatgaataacacaaatgcagcctcttcctctctaccgcttccttccatccagttcctgccttgctacctttcttttctgcctctcatagccattaaattcaggtcactactatttgcctttttgtcatctcatgagaattatgagggtcagctggagacttcatctcctaggaaacgagacatcacatctctgcacctggccctcttggaggcacccctggccatccccatcttgcaacctgctagacgtttttctacctggtcttgtacgtgagcacctgtgctaatctgtcactcctgatctaggtgtgttcccagcttttcctggtgttgtctgatggtctcacaattcccctttagtcatgcttatcttcctatatgagaaagatgcgtagctatacttcatacatatactgtacacataaacatagcaaatagaagaaacagaatgtgcatctgtctacagtaacaatatctttcttccccagagtgcaacaaacatgccattgtattgggagactgtagtaaaagttaatcctaggatgtacctggttgtctctgctaaaattgtttgcacctaaattagattaagactagactctacatattcaaagacatgaaagcctttcatgtctgtgaagacaggaaatgaattaacaatttgtacaagaacttttctgttccttccttctctaggcatctcattatttatacagtttctttttgctcagctatccttcatctaagactgacctccactcagctaaatcttcccttcttgtttccccaaagcagctctagtccggagaagaaaaggataatagagtaaatattacactaaacacggatactccttaagccaccaaaaaaagtaacaagaaatcaggaacaagtatatgctattttgaagtggaacaacatataaatgttcccatgttttttcttggcaggtggagctggacagaatatttctgtccataagacccccagaagtcccctaagtgggataccagtgaggactgctccagcagctgctgtctctccaatgcaggtagatgagccccagaaataaccactgcttatggtttgctgtgtatccctctagatgtttttctttacacatattagtgtccgtgtgtgtatgtgtgtgtgtagagtatgtgttttgtaaattggattgcactatgcattattccaatacttatttcactttatcatcggaatgtaagcttcatgaggtcagatatttttgttcattttgcttgctgttttatctcttgtctgtaacactggttggcacatggtcacattatagtagaagttcaataaatattaaatgaatgaaggaatatgttttcaaattttaatatttgcagaaacgattctttttataaaagattacataatatgtggtgatttatttagccactgttctactgatagaagttaggtttttttggatttaacttattacaaaaaataatacagtgaagatactgatacaaatttttgaccacttaaggggctactttttaaataagggtatatcaagattcatttgtaagtatcagagatgactgtagttaagcagaaaggaatttaatacagggattttggtactgagggctggagaaaggtctaggctgcactgagcttccaggaaaggttcccagagcatctgaaagttggcccattaaaggagcttctgtttctgccagaatcgggaagtctttctctaagtgcttacccaggactgccactgctaccaagatctaggatcagcctggtgactacactgccacaggtgcagtccatgccagaaaagcacactctgtgcctgccccatactgaccagaaaacggtggaacagaccccagaacctctgctcccctgccacagaacagcgaatgccttcccagccatgtttaccaggagaagctgcagaagggaagccttacactcccttgcaccttccagatcctctgagaaggggcctgtttgacagaagctaggccacttgatgagccaagctttaaaggagtttgccaagtacaccctttagcttcccagtcccttatagttcaataagtcgccctacaaggagatgaggatggagttgagtgagcccgtcttgagatcttctacaaattgattcctagtgaaggaaaatggagtcctagaaaaggaaatgtatttgacctgttccagcatgtcgaaaaacttgatagacacattgcccttcagtttgccctcccgcttacagtactattttccaagaattttgacactgtctataatttttgaagatcaagtaagtgaacaataatatcttgttttactttatcagtaaggtggagcacttcttcgtatgattataggccatttatctcttgtgtgtcggtgtggaaacttacatactttgcctgcttttcttttgaagtgttagtctgtttatgttttgtaagaagtattgatatattgtgctttttaacattttttcatatgtaattgtattaccttttttatcttttaatgtcatattaatagttatcttttactgaagagaaattttacatgtttgtgttgtgttttaagattttgttttgtttcctgccttaaaatgtcttttctagctattagatgattaaaatattctccctaaatatcttaaggaagtcttttatttcttcagtcttaaaacccatagaaacatgggtttggatttagatattcttcccctatcttaactgccttctggaagcagaagtaaatactctctggaggacaattacaccatctagatccttaaattatagccacattttaaaaaatacaacgttatatagtaactttaaacaataccaggcatggccaggtgcagtggctcatgcctgtaatcctagcattttgggaggccgaagcaggcagatcacgaggtcaggagttcgagaccagggtggccgacatagtgaaaccccgtctctactaaaaatacaaaaatcaactgggcatggtggtgtgtgcctgttgtcccagccactcaggaggctgaggcaggagaatcacttgaactcaggaggcagaggttgtggtaagctgagatcgcgccactgcattccagcctgggcaacagagcaagactccatcttaaaataaaataaaataaaacaaaaaaccaggcatacaaatagataataccaaatgatgaaaagccaagagaaaaaatagacaatagaaacagacacggaagattcagatattgatattattagacatagaccctaaaacaactgagattaatgctgtcaacaaaataagtgacaaggtagagaatttcagcagaaaaccacaatgtataaaaaagaatctgttagagattttatgacttaaaaataaaatacctgaattaaagactcaataaagtttagctgtagcttaaacagtttaagagaggcttaaagaactgaagacaagtcagtataaatatctgaactgaagcacagagaaaaaggataggaaatagagaaaaggacataagaaacatatgggatggaataaaaaaatctcatgtgtaattggagtccccaaaaggggagaaaaagagcagaagtgatattggaagggataatgatcaagaatttccaaaactgataaaagatgtcaagcccagattcaagaaacaataagaaccccaagtgagataagtacaaagaaaaccacccagacacatgaggttaaaactgctggaaatgaaagagaaagcatcctaaaagcacccaaaagaaaaaagatacctcaatgtccaaggaggaagagcaaaactgacatctttcttctcaagaagaatgatggaagccctgaagacaatgcagtggcatctgcaaaatgctgaaagaaaacacctgctttcctttacctcatgaaaatatgcttcaaagtgctgtacctggtgaaaatacccttcaaaggtgaacacaaaagaaagatgctttgagtccaacaaaaccagatgttttttcctaggatacttgcagtgaaaagactatttaaaggagttctgcatggagtttgttcttttaaaagactattaaaattcaaaacatctgacaagaaaagctaatgcaaaattacctgtatcaggaatttgtaaatgggtacatcactaaagatttcataattattaaagcaatagtaagagaatattatatattactactttgtgctataaattagaaaatattgatgaaatggtcaaaatcttagaaaaatgtaacgtgctaaacttacataggagagagtagtagaaaatctcaatcacctataatttatatcttttccttaaaagaaatgccagggccttatggcttcaccatgaaacctcccaaacatttaaggaagaaataatgtcaatcttacgtaaattcagagactaggaaagaggtcagcatagctttgatccctaatagttgcaagaacattaatagacaagaaaattaaaaggtctttctcacgaacctctttgcaaaaatcctgaacaaaatcttggaaaaccttattcagagacacatgaaaaagatcatgtcatgttgggtttattccaggaatggaaggtggttaatattgaagccaaccagagtaattcaccacattaacaaaggtataaaaagaatatggttggccaggtacaatggcttatgcctgtaatcccagcactttgggaggccaaggtaggtggatcactggaggccaggagttcaagaccactctggtcaccatggcgaaaccccatctctactaaaaatacaaaaattagctgggcgtggtggtgcacgcctgtaacccccagctacttgggaggctgaggcacaagaatggcttaaatccaggaggcggaggttgcagtcacctgagatcattgccattccactcctgggcgacagagtaagactctatctcaaaaaaaaaaaaaaaaagcatatggtcatcttagtaggtggtggcaggaaaatgtagtcgataaagattaatatctttcttgatggaaattcttagaaaagtaggaatagaagggaaagtctttaatctgataaagggtctgtattatatatctacagcaaacatcatacttaatggtgaaatatcggatgctttcccacaggattgtgaatgggataggaatgccccatattgtcacttttgttcagccaacttcaaaagcaagatttaaaactacttttgaaaactgtataccacgaccattatatttttgtgggatgtggatacatggaattgtgtttaatatgctatgaagtagagcctctaagagaaaataatgttctggaaagcctcagaatggccctgcacaggcaaatgtaccaggttgttcattgcagcattgttcctaatatcaatatcaacatgaatatcaatagagaatcagtaaaataaattatggtaatgaaaatagctaagatctactgaatgcttactatctgctgggctgtgttttgattgttctaactggatttaactcatttaatcctcccataaccctttgaggtaagtacgtttagtatcgttgccattttataaataaagaaaataaggcacagaaaattaagtaacccagagtctcacaggtgggtggtgccatctgtccccagagccacttacttggcctcttgtggcacttctcagaggaagctgccaagatggtgggtgatggtgggtatagaatgacttctaagatacagtaagtgaaagaagcaaaatggtgtacaaaacaatataatgctatgataacagttgtgtttttagaaaaacagagggtgtttttcaaggtttttccttgaataatatcatgcttacttgcattctgaaatgcttttttaaatggcagtaaaaaaaatacaccatgaaatctactctattaacaaatttttaagtattgttaactagaagcacaatattgtatggcaggtctctagaaaaatttttttttaaatttttaattttatttcagattcagggtgtacatgtacagatttgttacatggatatattgtgggatgctgaggtttggggtatgattgatcccatcacccaagtagtgagcatagtacccaacaggttttcagtgcttgcctccccctcctctagcactccccagtgtctcttgttgccatctttctgtcctctagaactttgttatcttgcctgactgaaactctgtatccacggaacaattccccacttcccctccctgaggcctctgggagccaccactccactgtctgcttctgtgattttgactactttagattcctcacgtacatagagttatgccgctcttgtccttcagtgactggtgtatttgacttagcataatgtctccaaaactcatttatgttgtagcatgggacaggatttccttcttttttaaggctgaataatattccattgtatattctataccacattttcttcgtccattcatctggtggtggacactggggttgcttccacgtcttggctgttgtgaattatgctgcaatgagcaagagagtgcaagtatctctttgagatcctgttttcaattttcttggataaatacctagaagtggtgttgctggatcatttggtagtactatttctaattttttgaggaacctccatactgttctgcgtaatggctgcaccattgtacattcccactaacagtacacaggagtttcattttctctacctcctcaccaatacttgttctttttcagttttttttttttgatgatggtcttcctaataaatgtgaggtggcgtgtcactgtggttttggtttgcatttccctgatgattagtgatgttgagcatcttttcatatacctattaaccattaaaaatagaatacttatacacacatccttgaatatacatagaacattccaggaaagatattcacaaagccaattaataatgattgcccttggagagaagaactgggagatgggaaggaaaaggagactttctcttcattatttgcccttttcattgcttttggggatagtgtctattgcatgtattacctattcaaataaatgagttaattaaaaactcccctggttattccactgtgtttaagaactgttgcacacacacgcatgcacacacacacatctgtgtttgtgctattcttgatgttatgagctcaccgtgctggtgtccccctggtttttacagaggcattcgacttacagcagtgtgcggccagccagcagaggggtgactcaacgcttggaccttcctgaccttcccctctcaggtaaattatgtcaacataaagaacttttgacttatctttccgtgcagttaacttttcttcatttctctgcatgaaactgagcttagaaaaataatcagtggcatttcttgcaagtgatttcaaccccgaataatgtacatatcatgaatgttagatgcagcagtgcagctgacaaaaggaaaaagtgtctcctgccagctgcacttctcagtgcccttgtgctggggagacaggcccaattttttttttcttttccttttttcagagacatggtcttgctttgtttcccaggctggtctcaaactcctggtctcaagtgatcctcctgcctcggcctcccacagtgctgggattataggtgtgagccactgtgcctggcatattgttttttaactgaacctcaagagcatattttctaatctttaaaaagtaactaagggaaaaaatcttacctgattttgaatttgtctgctacttctgcaattcttaaaatttgcccctttaaaggtatttgtcttttggtgcagtcctcttcctgttgttacaccgtgtgtgtgtgtgtgtgtgtgtgtgtgtgtgtgtgtgtgtgtatttgttttttgttttaactccaatcctggttgtaaagtggaggttgcattcagcagtcccagcagtccccatccatcacatttgcgtggcgtcatatttcctgtgtcacaggctgatgtgaagcagccctcaagaagggacacgtgggcttgagtctcagtactgctgctcagcctggctttggccccatcaccccacttctctgtgctttagtctcctcatctctaaaacggaaataatccggtccacttcctaggattgtatcaaggattgagttagcacattaaagcgccttgaacatgctgggtgtgtggcaagcactgtggaagtgtttactgtgcacatctcacctgctgttctctgctgacccagttcgcctgcccagaactaaagggacaacagtgctcaagcctagtgggaagttaaggttgtccagaatacggggcttagaacctatgtatgtgtctatgtggtgactgttaggaaataaaaaaggcaaaaagaacactgaatggactgtttactggtccctgtagaagggatagaaagccaaaagtctgggtcacatggacagaaatccttttgtttctaagcataaaataaaatttctacagctgtacttcctttagatcttggtcaaacacaatcaggcttgttcttaaaatagttgtttctatgagggaactttcccctctgaatcttctttgctttttcatggaattaaataaggattttagagttgggtaaacactgacaattgagaatttgaagatgatctgagcccattcctcgagttttacatgggagagattcaagccctacagaaattgagtgacttataaaggctacagcgattttggatggctgtggggccaggaagtctcctgattctttctaccatgtgcctcttggtgctgaggctggtgattgctcgagtaatagctttctaaagtggtgaaagtttacgtgggactccaagtcatgatagtgacttcccagcagaaggaaatgaagaccaaaggccagtgtaaagtcaagagtgtaagaacaaacagagttcagtggaggtagagaaatgagagagtacgtgctccaggagaccaggcctgagtgtcccatactaggaggggagtggaggagaccagagcacagcaggaagcccacttggctcaccatctccgtgcttgctgtgtagcacaaaagagggaataatttgatgacacgcatagtgctaggtgtggggtttttgaaaaattgtggtaaaagacacataatataaaatttaccttatcaaccatttttaagtgaactaggtaagcctttggtagataatatttgttcttctctctgttccactagccttaaagttttctattgtgtagagacaccattctttctggttttctttgagagagagtcttgctgtcacacaggcaggagtgcagtggcattatcatagctcactacagcctcaaacatctggcctcaaatgatcctcctgcttcagccttcaagtggctgggactagaggtgcatgtcaccatgcctggctaattacaaaaattttgtggggggatagagacagggtctcactaagttgcccaggctggtcttgaactcctggcctcaagcaatcctcttgccttggcctcccaaagcgctgggattacagttatgagccatcatgcctggccaagaaaccattcttttttttttttgagatgcagtcttgctctgtcacccaggctggagtgcagtggcgtgagctcggctcactgcaatctctgcctcccaggttcacaccattctcctgcctcagcctcccgagtagctgggactacaggcgcctgccaccatgcccggctaattttttgtatttttagtagagatggggtttcaccgtgttagccaggatggtctcgatctcctgacctcgtaatccacccacctcggcctcccaaagtgctgggattacaggcatgagccactgcacccggccaaaaccattcttttagttgacacggtacatactgaacttgagaccacaatagcttattgctctgcagttaatatctcattgacagccctccctacttagcccccaccaggcacctgtctgcttggatgattatatttactgttattacagcaaaggattacagtgacaattacttgcttctagcaatccccaggaattgcttgtcaacactgaggtcattggaagctgcagaaaccaaagattaatgtgctgttcttgttgttcccttggatgtaaatactgtttttctctgctatttagagctgactagcctcactcccaactttactgcccctaattggtggcagtgagctgtggaaggattactttcttctgtgactattcacaggtcatgggcggcaactgtgggctcatcctggtccctggtctgctctgtagcttagaacaaggcacttagttctctgagctccagtttcctctataaatataaactagacagtctcgaaagatgtctcctgttccgcacttttatggtcctttgagaaatatagtctggctagacatggtggtgcactttcctgtagtcccagctacttgggaggctgagacagaggatcattaggaggtcaagtccaaatccagcctgggcaacacggcaagaccctgtctctagaagagaaaaagaaaaacaagtatcatctggaggattcagttcatttcattacctgttttttgactcagactaatatgacagcagaaaggagccttgaaagagtgattcctacttcttgtttagcaagccaggccctatggctagaatggccttttctcttgtcaagtagttcttcttggttcccagcttcttgtttattgctgcctgtggtctgatcatcacttgaggcattttcctgccactctctctcagatgtctgtcagttaaaacaaaagatactacctggggacagggctggcttcgttggcacttgcacaaggcccttagaaggacacatgcttggtgtaatgctctgatgacatcatcttgaaattcacagtgatttttgagcaggaggttgatttggtgctagatgctgtaaatgatgtagtggtcctgcctgtagaatccacatccctattgcatttttattacttcagaaactatatatatgtttgcacttgaggataaaatgagaactgtattgtatttgagaatgaagtatgatggcagtcaagagctgcttctttgggaatgagtgattatgtggttgttcccacagatattctaaagggaaggactgagaccctgaagccagacccccacctccgcaagagtccctcactagagtcactgagcagacccccgtctctgggctttggggacacaagactgctgagtgcttccacccgggcatggaaaccacaaagcaaactcaggtatcgtgtttcaaacaataagaaatcagaaaaacatcgggctaatcaccttttattcttccttccgttttgtccccgtggccaatttacttctacaaatatttcctgcatgaaaatgactaagacactgtgcctgcccttggtgagtctaaaaggatgacagtggatagtagtagtgcgcaaaatggaattaagggctgtaaaaaacaatactgcataagcaaagtcttgagaggttgttagttggatcaagaagtctagagagaagtggtgtttctgccaagggctctaaaggtaccattacaagcacgctgtggaatagtgatcagggaatgtgggtggtgtcatgtgtctgaactagtctgtgggcttcctgagagccgggactctgctgtacatatgcataacaagctctctgtcagtatttgttgggtggatggataagtgactaggacattccatctggagggcatattgtaagtagtcttcattgctaaggaagaggtttgtgcattattttggtaaagcactggagtaccaccaagtttgtgggattttgtttcggattttgaggttgtacagtgagattggacctgcattttaaggaggattcatcagaaaacagtggtatataaggattgaagaggcattttgaaatcagtgtttaagaaggactgtcacagggatgtaaaggaatggttggcagagggagaggatggcaagaccagcagggtggtcactaagagcttgtctttgttcccacacctctgtcacctcctccctttccagtgcccctggtcgcccaggccacagcaaacctctttcagctgcttcctctccccttgtgacttccctgcttctctgtgttggttaattttctgatgcactgagcacatcctgctgcagaccttgcagaaatctcacatgactctgtcatctgcactcctcatcctggtcttctagatgccccacaacttagcaccaccccacccacctgccagaatggccctgttcctccctccacctgagcctgttttagtttctgcctttgtaatagaacatgaccatgtctgattgcaagtctttatgtataaggttctagcctgaatcgtttttcttttctcctttcatactccaaatactgcttctccttcaaggtcaaacctttcatgaagttgtacctaacacctggcacattgacatatcccttctctgactttggcgtcttacacttttttgggtgtttagtttttgtactgctttgtagtgtggaacactgttgcacagtacatgccattgtctccatttatgctataatttagttgacagtaaaagttcaacttacattttggtatctcttccagccccttgcattgtgcaacacacatagcatttcacttagtaaaacttacgagtgagtagatggattaatatacaaaattggctagtttaggagtaatagctttttaataaatcttataatcacaaatatgggtattatagaaggatttataaaagtctgaataaattcaggtcttgttacacctttgggtacagcatatatttggacccaaatagatgaagtcatgtgtttcagaagtttaatgtaaagccccagatactacatattgtcctgtttatgtgcaagagatttaaataatcaaaagaggttttaaggaccagaattagtgctgttctgaagttgccgttttctttatgccagaaatgcatacaaaaaggctatatgtatatgaatatgctattgatattttaccttttttaatgaaaagttaaattagtaaaattcttatttcaattttacacttacgttattgacataaacaatggcaagatatttggtgtttttaatatgcccttccaatgcacctttaaaatttattttattttattttttggagatggggtcttgctctgttgcccgggctgtagtgaagtggcacagtcatagtgcactacaaccctgaactcctggcctcaagcagtcctcccttctcagcctcctgagtagctgggattagagatgcacaccaccatgcccagctaatttttttattttttatttttttaaagatggggtctcgctatgttgcccaggctggtcttgaactcttgggctcaagagatcttcttcccttggctcgtaaagttctgggattatagatgtgggccactgcacccagccaatctaccttttacatgttatttaggtactggtttagtcttgaaacatgtagggtgtgttttgtttacgtatctttaattcaaatgatactgtacttaagtaaacaaatgaaagactagatggatgagcaacaaatggatttgaaaacaaaatgtaacaaaactctccccaaatttatgatagtcaggaagcacaatttaatttttattttatactgtgagatatcacaaaatagtaatgtgactaattcggctgtttctttagaatcttgctggataaactagacttttgcttttctaaagtaggtatttatttcttgtgtatttgagaattctaagtattagcatcttctccttaccatgtgctcttctttctaaccagtgtggaaagaaaagaccctctggcagccttggcccgggaatacggtggttccaagcgcaatgctctactgaaatggtgccagaagaagacacaaggttatgcggtaagggacaacatcagccaacttccagctgcccctgggcagtagtagtcctgtgccaatacatgttccttgtgtgcctgtgcttgatgggccaatatgcatgtaattgtcatctttctattctcctaggcagggctgccagggaatgtttgatatttgtgcactgcccaaaggcaccgtgacagaggcaaatgcaactgaaaaacggtctgcactccacccaccaaatgtatggctgcacgcagagctgcacctcccgagggaaggggacctttttctttggtcagagtgttactggccacaggttcttgggctgtcaatgcgatagaaattgtcatgaggccaaaagagttttctcaacaaggctttattggagcttatgcccttatccctcaggcatgagggaggaagcacgggagagggaggattctctggctgactccttgaaatgagctggtagggatttttttattaagcaaagtgcaggaattgatatcaacatagagaatgtgggctgggctgggtagatcatatgaggggtaggggatgtgggtcagtttatctgctggcgacggttgtcttgagtcatgggccacctagtgttctggttggtggcagcaaggctgtaaatcagttgtttagcattcttccctgagatgaggacatttgcaactttggttggatatgttggatttcctagggccagtttctggaattatttaagtaaaagaattaaacattcttttattcttttaaacattatgagagtgcggaaaaacagtatggctattttctttgcatgactgttaagcaggtatgtcagtgaagtagtggtgtgggttttgtgatcagtgggaatgcatgaaagaatgctatagtggggatgagctgaagccaagtcctgtccctgctgtctcagaagaagacacaagctccagtggctcacgcctgtaatcctagcactttgggaggccgaggtgggcagatcacgaggtcaggagatcgagaccatcctggctaacacagtgaaaccccatctctactaaaaatacaaaaaattagccgggcgtggtggcgggcgcctgtagtcacagctactcgggaggctgaggcaggagaatggtgtgaacccgggaggcgaagcttgcagtgagccaagattgcgccactgcactccaggctgggcgacagagcaagactccgtctcaaaaaaaaaaaaaaaaaaaaagcagacacaagctccccgagcagtgatgcctccacccaagaagacagcttttgctgaattaccctcctgaagaagagtgctttgcctaattcgcataaaggtcctatgtagttgggcctccaaaacttctccaaacattttgtttctattgttttgagaattgtttgcgtttagtttaagagtttttgttttctaggacagtatctgttttctgtgaatatcagaaaagggaagtaatacctgatgtaagtttaagtttttttcttgtgaaatacacaaagataaaatgcacaaaatataaatcataatttcttgaactgtgaggaagtgaaaagtcatgcagtcaccactcccatccagaagaggagcatcaccagctcccacagacccttcctatgactttcccatcatagccctcagtactccctaagataaccattgtcctcaattctccttccagatttttacaaaagtatgcatccgtaagtactatgttagtattgcttgcatttgaattttattacaaatggaataaaaaactatgtaatatttgcagctagctttttttacacggtattgagtcagtgagatttatcctcattgttgcatatagctgtaatttgttcattttcttcaccatttagtaacccattgtaggattataccattatttatccattcgattattgatggagagttgagtcatttctagtttggagctattatgaataacgctgttatgttcttgtgcgtatttcctgaaaaacatatgtgctcattcctgctggatacatgcttaagaatggaattcctgggccatagggtatgcatacaatctagtggatagtgccaaacagatgactgaagtaattgtataatttatgtctctccagcaatttatgagagatttatttctctgcattcacatcaacacttggtattgtcagtctttttactcaaggtcatgtgggtaatgtgtagtactgtctcactgtggttttggtttgcattttcctgttggctggggaggctgaacaccttttcatatgcaaatagataccctctttaaaattggcaattcctactgcattcttaacaatattttgctaaaatttcggaagattccagcaccgtaatactcccttcccaggctgaagcttttgagggaggtggggatggaaaatgaaagaagctagcaagaaaaacccagcctcagccaagatccatcccagatagtaaattagcagggctgggagtctctgtcatgtcagcagtcagatgtcttaaaaccagaatctacccagagtatgtgtatcctgtatctttgccattaccttcttttcactttatgttaaaaaagaaaaagaatcgcagcactttgagaggccgagggggcaggattgtttgcgcccaggagtttgaggctgcagtgagctgagatagcaccactgtagtgcagtgtgggtcagaaaaaagaaaagaaaaacctgtcatgctactgaccaataatagaggctcccaaagtataaactcgcctcagacccttgtttattcttcctgctaccctgtccactctgcctctgccctgtttcaaggatggaccatgccatgaaggaaggcctcttggttacagcctcccccagcccatcagccacgctgccgaggacacgggaaagaataagaagccataagaaccaatagctatgacttcttattctttcctgtgtccttggcagcgtgactgatgggctggggaggctgtaaccaaggggccttccttcatggcagttgaacaatgtgaacacttggacacaggaaggggaacatcacacacgggggcctgttgtggggtggggggaggggggaaggatagcattaggagatatacctaatgtaaatgatgagttaatgggtgcagcacaccaacatggcacatatatacatatgtaacaaacctgcacattgtgcagatgtaccatagaacttaaagtataataaaaatatattaaaagaaaataaataaatatcaagaaggagaaagaaaaaaaaagaataagaagtcagagggaggcagctgcctgcaggaggtttagcgtaaagaaaataggaatggtgatgggaaattgaagaaaacatttaaaaagagctgtcattcaagaatgactccactgatgccgcctgtgctgttccccacctgacagtaatggaccaaggcagctgccagagtgcatatgaaaagacaattcacgttttcagaaggagtggccttctatgatgtaaccttgttgtaatgcagggaagagacagacaataagatgtttccagtcaggatcacaagaacactatttcctgctggagtgatttgtgtgtgtgtgtgtgtgtgtgaacattttggattcgttttcaaaacattttacgtttgatgaaacccaaaactcattttgcctgtagtacttttcattcatcatgaaatctctgtaaaattagaaatatgaccatgtgtctgctttatttacccttcacaaaatatgtctagacctgtttgtctgagacacctcatagtcttgttctctcagaattaggaagccaaaaataactggtgaaaactttttgaaaaccgggaaccatgtgtacttgacttaaaataactttccttttatttcatcaaaatacagcgtgaaaggttatgttacatccctccatatatatatatttttatttcagctttagttatagattcagggggtgagtgggcaggtttgttacaagggtatattgcttgatgctgaggcttgagttatgggtcccgtcacccaggtagtaagcatagtactctgtaggtaggttttcaactcaggccttcttcccttcctcccttgtctagtagtccccagtatctattgttgccatccatgtggctttttttggagacggattttttttttttttttttttttttttttttttgagacagagtctcactctgtcacccagtctggggtgcagtggcacaatctcaggtcactgcaacttccacctcccaggttctagcaattctcctgccttagcctcccaagtagctgggactacaggtgcaccccaccacacctggctaatttttgtatttttagtagagacagggtttcgccatgttggctaggctggtctcgaactcctgacctcaggtgatccgcccaccttgacctcccaaagtgctgggattacaggttcacacctgtaatatacataaagggctactggatacatatacataaaaagggccactgcacctggccctttatatccatatgtactcaacgtttagctcccacttataagtgagatgtggtatttggttttctgttcctgcgttagtttgcttagaatagtggcctccagctgcatccatgtttttgttcttttatatggacatgatttttgttcttttttatggctgtgtatttccatggtgtatatttaccacattttctttatccaacccactgttggtgggtacttaggttgattttatgttttttctactgtgaacagtgctgcaatgaacatacgagtggtagaacgacttatttttctttgggtatatacctagtcatgggattgctgggtcaaatgttctatttttagtaccttgagaaatctccaaactgctttccacaggggctgaactaattttattcccaccagcagtgtataagcatttctttttctccatggcctcgctagcgtctgctattttttggctttttaataatagcctcctggctagtgttagatggtatctcattgtggttttgattcgtatttctttgaagattagggatgttgagcgtgttttcatgtttattgaatgtatatatgtcttcttttgagaggtgactgttcatttcctttgcctattttttaatggggttatttggtttttgcttgtggatttaagttcttatagattctggatattagatgcatagtttgtgaatatttcttcccattctatgggttgtctgttaactctgttgatagcttcttttgctgtgaaggaactctttagtttagttagattccacttgtcaattttttattttgctgcacttgcttttggggacttagccaaaaattctttgctaaggccaatgttgaaaaagttatttcctaggttttcttctaggatttttatagttcgaagtcttatatttaaatctgtaatccattttaagttaatttttatatgtagtgacaggtagaggtctagtttctatcttctgcgtatggtcagccagtcatcccagcagcatttgctgaatagggaattctcttcccattgcttgtttttgtcaaagatcagatgattataggtttgcagctctatttctggatactctaacttgtgtatgtgtctgtttttataccagtgccatgctgttttggttactgtagccttagaatataacatgaactcaggcaatgcgagtctccagctttgatcttcttacttaagattgctttggctattcagactctgttttggttccatatgaattttagaatagttttttctaattctttgaaaaatgacatttgtagtttgataggaataccattgaatctgtaaagtgctttgggcagtatagccatttgaatgatactgatttttccaatccatgagcatggaatgtttctccatttatttgtgtcatagctggtttctttcagcctccttccatatattgttcagctccaggtaatattgtaggtgctgggggccgggcgcggtgactcacgcctgtaatcccagcactttgggaggctgaggcgggtggatcacaaggtcgggagatcgacaccatcctggctaacatggtgaaaccccgtctctactaaaaaatacaaaaaattagccgggcgtggtggcacgcacctgtggtcccagctgctcgggaggctgaggtaggggaatggcgtgaacccgggaggcggagcttgcggtgagccgagatagcgccactgcactccagcctgggcgacagagcaagactccgtctcaaaaaatatatatatatattgtaggtcctggggattccacagtgaatgaaacaggcaacagtccctgctctcatggaacttaaatcctcatggggtctggcagttaactgaaataaaaggtaacatatgtacggtatttgaaggttgtattgccgtggagagaaataaagcagggaaggagggttgggaatgttgggtgaatggtacaatttatacatagtggtcagggagatgacatttgagcacttgctcccctctcttgaagggctttggtgtctgcatgaagctttatttcccaccaaggcctaggtgtggagggtcagagtaaggaggtcattactgtcgttactgtgccaatagaagctgaagtgacacacggtggtcgacccaggtcagcagcactgggaagtgagcatcgcagccagacccacctgccgagctccgggccaactgcctgacatctcgagtggcccaggattgagacccagtgaaaggatgtgagtttgccctcactacgaagtgaggcccagttcactaagctcaaaatggcgctcctaggaggcccttcctcacattctgctcaactcatacacactggtgtctttttggaataagtcactcctggaaaggccctctaaattactctcagtcctcaaatttcatactcctgatgtgtgttggctgttttccaagccaagggcaggcctgactcagataactcctacccctccctttctttcatctgaaagtctagtttaagctcctagttttctgttacgatggagagatttccatttgtaatttccagtaagaattctgaagggacagaaagtcgggagggtaggtgtgacaggaagaattctgaagataacccccatgactctccatggtagaatgtcctcctctttatatgacacagggagatggtctggatatgcccactaatcacaaacccctgtagaagccaagtgatgtctctggcttgtggcagaagttggggaaattcaaagcatgagaaggactctgattgttcttggtggtttgaagagggagggggcacgtgagaaggagccaagaagggccccctggctggcagccagcaggaaacagggactttctagcactaaagcattagtgctgaggtcctggccgtgcccagaaattgccatgtgggtgctctggagttttgaggttgacaactgcaagttgtgtgtagtgccaccgggtcctttgtctcctcctctgtcctgatgccctcagacctcagccaggccagggacgctcagtttgctttgccttctgctttccctcagctgggggatcttgggctggaagtcactctgatgaacatgtggaattcagctctaagtctctcctgagtcctctgttacctcccaggaggcatgatgaggcacagctacccttcacctccatgggtggcatgaagatacttgcaagtatcttttagacgaaaatatataccggtatttactgttacttgaattcctgtttggttcttgcatttcagatcaaaagaaagaagagtttagatagggatttacttgaaaatgtatctgtatctgttccacttttgaaattgtatggcaagaattcagatagcaggcgacacctacactatcattaagggacagatgacgtctttgaaccaggttttaacctgttagctcagacctatatcttcttctcttttggagaaaaaaaaatcagtctttgtgtgtccacactgaattttgctttgaatctggaaagaacacccatgttgcaggcaacttctgttgttctgtctctgagttcccacaaacaagcactaaaatctgcttagccaatagcaagcagcctctaaaatatcaggtcacttggggctctgtttcttatattcttttttgagacagatctcttgaaggctacacgcacaattcaaagaacataaagcctttgatttatttactgccatcagagtggtcctttccctgacttagatgatagagtctcaatagcagatgcgcggcactgtgggcttccactctattgaggccttttctacccactttctctgcttctgtaccgtttctgacacagtggtctgtgaagacattttcagtggcacaggtgttgtcctacaacctgtgacaacagtggagtttgtttgcaaaataaagatgcaaggctttcccatgttgtgggagacacagtcctctcctggtggccgtgtttctggttggttttctctcacgagccagtgtgctgtggggcacccgctcccactcccactctcagtggtgtgtgcatgcccagaggtatgaaacttcaaggaataaaagtggctttctgaacaaaaatatcaaagtgtgtagagacctgtcagactgttcgcacagcagatggggagggacacgttctcccaccttagtctgcacaaacaccgaagaagcagccctgacaagtctaagctgggcacatccccaattccttgggaattttggaaataaaactgagaaagattactctaaaatataaagcccagatgctattggcagccatgtttttgcctctgtgcaaaaaagacttaacccagtaggcctgggacggctctctttagcaaggctgcttgcaaggctggcccttggctggcgtctgggaactgggattacaggagggttcccattgtttccagaactgatgagaggggctcacggtgctgaaactgtttgtgcaaacacatggtatgtgctgaacagcagctttcctttggggagtctggaatgtagtatgtgctgggcagaaggggctggatgctgagtccctagtgagcttccctggttggcagcattttttcttgagatggggtttcagtcttgttgcccaggctggagtgcaatggcaccatctcggctcaccacaacctccgctcccgggttcaagattctcctgcctcagtctcccgagtagctgggattacaggcatgtgccaccacacccagctggtctcaaactcccgacctcaggtgatctgcctgcttcggcctcccaaagtgctgggattacaggtgtgagcccctgcacccggccggttggcagcatttcacacgtgttgtcatggcttgttgccaggggaattaaacatgtccgtgactgctggagagaattcttggaagcacgtgcctggtttcctcgggacttcctgccctgtgccttttccctttgctgatctggctttgtgtcctttcgcagtaataaatctgtgaatagccgtggccatgactccatgctgcgtcctgtgggtccttcccctgatcattgaacacgggctttttattgagccttaaaaaggagtaaggcactgacacaggctgcagtatgaatgttccctgaagacgtgttgccaggtgaaagagctgggtgcaaaatctacatcttgtatgagtccatttataagaaatatccagaataggcaaattcacagaaacagaaagcagatgagcggttgccagaggctgaggagagagggcaatagggactggagtggctgcttagtgggtacagggttttctgttgggtgatgaaaatgttctggaactaggtagtggtgatggttgcacaacattgggaatgtgctaaaagccactgaactatacactttaaactggtttaaaatggtgaaagtgatacattaattttaccttaattttttttaaaaaaaacagtgttatgaacagacacgatagctcatgcctgtaatccagacactttgaggggccaaggcaggaggactgctgagaccaggagttcaacaccagcctgggcaacatagcaaggccctgtctttaccaaaaaaaaaaaaaaaaaaaaaaaaaaaaaaaaaacattagccggctacgatggtgtacacctgtgattccagctattcaggaggctgaagacagagacttacttgagcccagaagttcaaggcctccgtgagctatgatcacaccactgcactccagcctgggcaacagagagagaccctgtctctggggaaaaaaaaaaaaagtgtgccatgatgatgaatatcacttaccatgcatttttatgcttatgctaaatagttgtgaaatagtgccaaatttttgtaaagtaagttcctagaagtgaatttgtttttgcaaaagggtgtgttacactttccattttaatatatattctcaaattgccttcattaaggttatttagtttacacttctctatacagtgtacaagattatacattcccaatactggatacacctactcttttgatctttttcagcctaagaggagaaaatggcatttcttttaatttttcattgcagatgaaggagaagcactttttatcaacttgttagttatttatatctttcttctgtgaattactactacagttgctttgcttgcttttctatttgtatgttcatcttttttcctcaaaatttgtgatagctctttttggttttcttttggtttttatttttatcaaagctctgcatgcccacaatcaggtatgcagagatcctgatgagcaaagcagtcagccggcctgagagctctgcttcctgctccccagagtcaagcattttcaagtcaccttgctgattttttttttgtcatttacctctacgttgctgactagcacgtttatcaactgctatttctagtttttcattttagatgttgtattttgatctcctactgtgaaagatgagggtttatttctttttcactcccaccccccccatgcttcctgtctttgcattctttcatggttgtacatatctggagttcacattaagatgctgtgagtgtcattcatagattagccatgtagtagtatacactgctgcagctttttcttttacacaacctgttacttgccttacacttaaaatcgtcttgtttttgtctgtttacttagttttgtatgtaaatgatactcattcaaccgcaactcttcatgagatatccccacacatcacaagggtcaggggttgcagctgtgttatcctgaggagatctctctggagcctctgacctcttccatcatggctgccctctatgcctggtgcacagagtccctgttagttctttgcctctctcttttttgatcttctgtatcctacatcctattcttttttttcccctttgtttttttttccctttgtttttttttcccttcagtatctccctgagaatgagttcatagatggtaaaattttatgacctcgcatctttgttttaccctgatgcttgatggtttctttaggtataagattttaggtcagaaattattttcattcataattttgtgggcatcgctccattgtcttctatttgccagtgttgcagcaagaaaagaatgattacagtcgtttgtgatttttttttcctctgcaaaagctcataggaggttctggttgtctccaggattctaaaatttcagggtgatgtgccttgctctatagcttaagttttgtgttttctatcatgctaggcactcactgcaccctttcaatatgtaattcatgactttattttctggaattatttcattggtaatttcttctactctgttttctttttctggaaatccccctggcctggccctctaattatcatattctttttttcccctatttctatctctttgcattacagttttgttttctgggaggcttccctaactttaatcttccaaattctattaaatgcttaattttgcatttttttttttgcttttgcatcatttcaattgttttttaattgtgaaatgtacataggataaaatttaccatcttaactatttttaaatgtacagttcagtatcgttgagtatgttctcattattgtgtaaccaatctctagaatgttttcattttgcaaaacttaaattctatacccattaaacactaatctgacattcccctcttcccccagcctctggcagcagccattctactttgtatcactatgaatttaaccactttaggtaccccatataaacggaatcatacagtatttgtccttttgtgtctggcatatttcacttagcatgatgtcctcaaggttcatccatgttatagcatgtgtcaaaatttccttcctttttaagactgaataaaattccgttgattatatttgctatcatatttttaacttctaggatttcttttttattccctgaaattttttatagcatcctgttcttgtttcacagatacaatgttacatatgaatttcactgaggattgtaggttgattttatcaccaaatctctctatgcagattgtttcctacagtccctttattccattggtatctttaggtctctatctttatgctggaggtttgactgctcatgtttaggtggaggctctgcaaagctgaccccctccctggcctgcgtatgaggcctgcgactatgttcctgtggcatatccatgacgaacttctggtgtcagtgtctttaggtggtccttcctcttgggcacatccattctccagagaaaggccttctagtctcctgctggaggacatcaacctggcaaccagaattgtgggacctaatcagaaaagaggcctgtgggccaggcacagtggctcacccctgtagtcccagcactttgggaggccgaggtgggtggattgcttgaggccaggagttcaagaccaggctggccaacatggtgaaacctcatctctactaaaaacattagtggggcatggtggtgcacgcctgtagtcccaactgcttgggaggctgaggcatgagagtctcttgaacctgggaggcggaggcgagatcgtgccactgcattccagcctgggtgacacagcgagactctgtcaaaaaaaaaaaaagaagaggcctgggggtggagagtgactacctcagccctcaccatgtaaattcacttaattcccttgttttcactgcatcactcatgcctccactgctcactgtcctctgggtgtgcacagaagagagaacgtttggagctttggctgctctataaacagatctccaacccattcttcctgtttttaaccaccttcattcccccacctgaagcacctcttgccaccaatttcctgtgtctttgagggattttgcaccataaatcaggttgggtctttgcccttcgccactgctggcctgggatttagtttgcttcggtctgttatgttagttatctcttgtccattgacttttcagctgccaatgttttgtctttttgctttctttcatgttccctttttccttgtctgttaatgcctttggaggaaaaattcctttctgtggttttctggggcttcacgagggggtgagattgtgaatgcatgcgtttcattgccatcagcctggaggcctcagagagctttattcctttctccttaaggatattaaccattatctgtcatagaggttccaagtaccctttacatatatactatattatatacaaatacacacacccttttgttccttctggagtgcatttgtgtttgttaggtcaagttttatttttcccccagatggatggctatttatttcagcatcacttatttcatcatctctcttgaactaactgataggcctaggtatgaatgggaactgagtggtgtctggacttgctgttcccttctgtgcctctgtgggtctggcctctgccacaggttgctgccgagcagagaaatgagagcaggacctgagtgcggcacagcgccctgggcctcagccagggtcctgtgagtgtcagtcagtgctgtggcatgcgttgttttgatgaatttaatgccctggcatttttcattatttgattatacttgttggttttctaggtaaactattacacataacaatagttttgtttcctttttttcttttttcttttttttttttttttttgagaggtagtctcaaaaaagtctcggctcactgcaatctccgcctcccaggttcaagtgattctcctgcctcagcctccctagtagctgggattacaagcacgtgccaccacacctggctaattttttgtgtttttagtagagacgaggtttcaccacattagccaggatggtcttgatctcctgaccttgtgatccacctgccttggcttcccaaagtgctaggattacacacatgagccactgtgcccagccttgtttcttctaatatttatacctcttgtactttttttggtttattgcattcatgaaagtccaggtcactgttgaataatgctattgatggtggatattcttgttttattttctgttcgtaataacagaaataagatttaataatattattaaataatttaataataatttaataatcacctaaatgagattcttgtattgttttgtgataaatactctatcaactaaaggaagcttgcatctgttttgagcttaccgggggatgttttaagtccagaaataggtaagaattatatcaaattcctttttagcttttaatgagctatccatatggtttcttctcttttgacccatttatgtaattaataacataaatacatttactagtaggggaacatttgtacatatctgggggcaaaattccaacttggtcatggtatactattcctgaaggaaactctacttgattgtggttattctttaatgtgaaatatacgattttttatactcagttattgatgagacatttggcttcttgttggttgctttggtataaatgaagttttgtctcaataaggcctgtttttgtttttgttatgatgttagtgagctctaaaaccctgtatcatctgtatatagtaaaaagtgcaataggtatttattttaccaccttctgtagtaggattaatgacagaattaattcttagccaaagagaatgttttatactctagttgcaaagttctgtccagtctgacaaatgaaaacctgaaaaccccaaaaatgttgttgggtagaagttgggaaacctttcatttaagcttcagacaatttttgtgaaaagtataagagtgaagacttaacatttttcctggaactgatgctcttttgttttgatgaaagtcctctgaaaggacttgttagttgcatagaggtaaggctaggcccctgcctattctcagggctcaaggcctgagcagccgaaggcccatcagtggtcccagttacctcagtgggagctcaagtgtcccctgtccccatgtggccacttgatctgctggattctgagtcaggtgtgttgaaatctcttactctgactgtggtttgtgtcaaaagctttgattgctgagagattatgttccagatattttgaaccatacgtaaaggtttcttgttctatcttcttggtggtttttaccttttacttcagttaatccttttgatctagaagcttacattttatataccaatattgctatttccatttatgttttctgtgcattttatgttttgcatttatgttatttgcatgatatatctttgtactttctttcctttcttctctttttttcccccagagttggagtcttgctctgttgcccaggctagagtgtagtggcacaatcatagctcactgcagcctccacctcctgggctcaagcaatcctcttttcttagcctcctaagtagctgggtctacaggtacatgacaccacacctggctaattctttaaaaaatttttttagagacagggtgttgctatgttgcccaggctgattttgaactcctgggctgaagagatcctcccacattagtctccccacttagctgggattacaagtgtggagccactttgcccagctcctttattttcagcctttcttagttggttgtttcagggttatgtcttataaatagtttggctttacatgtaatctgaaaattcctctaacagggcagcttagcctgttcacattttcttgtggctgtatgtgttttatcttcttcctctgtctcactttctatttttagtagacttctcttgctggcttccttcttactgattcccaggcacctagcagcgtggtaaggtgtgtgagttgaagaggtggaaaaacccaggcctgagactctgaggggtaaccacagtggaataatcataaagtttaaagctagagtctgtttttgttaaactggagcagaatcataaatcaaacacattttaaaaaatgcagagctacagagccggctgcattagtgagaaacagccccgtcggcccctttggggtcagaagtcagaattggaggcagggcctgggcccagttgctcttgccagggctgctttctggggtagaatggaggaagagccatgggcaagggccaagtccactggccactgtcaccaggggagcagcccgaagtcagggccgtacctgggaacaagaaggactccaaagacctggagcagatctggagcactgtgagttggaggagtcgggctcggatagcagcctgcaagggtgagggtgctgagaaagcaagatggacagagagggacagatgtggcccattcagggatccagaccagtgtctcatggcatctgatgtctagtcaccagcatgcatggggacatgcctggacacttgggctgatgcttctgcatgactgagcctcacggtagcagggtgcccctggacagaaacaaccacatgaccaagcagaactccttagcagccatttaaaaggataactggaaactctccaacctaattgggtaagatggcttaccaatttgctaagtagggcatatgcttaaagtactttttaaactttttttttaaaatgatgctgctaaatgaaagtatgtttaatttcacagggaggatctgtttttgccaaatgaagttcacttagctccttttattggtgctttggggaagagggggtgtggtctgtccctttagccttatagttcttgatctggtttttctttttttcttttttattgtaaaatacacataacatgaaatttatcattttaactattttaagtgtacagttcaggggcatgaagcacgttcacatggttgtgcaaccatcactgctttctatttccgaaatgttttcatcatcccaaactgagctctgtatgctttaaacacggggtaggggactccatattccccgccctcagcgcctaaccaccgttccgcttcgtctctgaatttacccattctagccaccttgtagacgtggacttacacagaatgtgccctttgatgaggggctgatttcactcagcacagcgtcctcaggcccacttatgttgtggcgtgtgtcagccacgctgcttctgcatccatctgtccaccttctcctctccatagtccccaccccatcctgggtcaggagttgtgatttttccttgtgtcttccagaaccaaagctgggagatcgcctgctaccatggcttgaaaacccttaacgactctgcagccagcagagttggacccatattcctggcctgtgtgaaagaccggctttttttaatgggactatttagctgtattatttgtcctcccttttctcagaggtatggaacatagctcccctccccaccctcaccacacctacctgaaaaacgggaagattagatccaccatgtccttaaggaaaagaagagagtgttttgattgccaacaatttgggctccaggcttctgtaagtcatcaaggtccatattggagaattagaagcaagagggtaacagaggcagaggataagagcagaggcttaggttgagggagagcagaggccagcgcccttggatgtggtggccgggggctgagaggtggaactgggaagactggaaactcagccaccctacaggctaagggcccacatcctccctcttctgacctgccaaattcctacaacatgcaggagaaagtgagggaactaataaggtgagcttattaatctggttaaaggttcttggctgggcacagtagctcacacctgtaatgtcaacactttggaaggttgatgcaggaagatcacttgagtatagaagtttgaggctgcagtgagctatgattgtgtcactgcattccagcctgggtgacagagtgagaccctgtctctctctctctctctctctttttttttttaaaggttcttaccatgagttagcctcgtcttctgacttcccagggtcatttgaaggaagcatctgcatcaaaactgccaatttacactttaaaattttttatataaatgttagatgttttgccagcttcaggaaggaaaaacaggattttcaaaataaaatgttataagaatgtgtcatcctcctggggactgagggtgatttaagtcccttggtcttctttcctcccatgggctgtttgtccccagctgagggcctccatgggtcaagtatgccagcagctgctgctgcagcataacactgcccaacaccaaagccatcatcttgtcaccattcagaaaaaggaggccttgatttttgctgctgttccttctccatcccccaggacagcatgtgagtctatttagataatcacagtcccaggtgaatctgcactgagcattttttccattctcttactcgtgaaatgttcatttgggaaaaagaagtaatttcatggcaagacacttatgatttcacaggctgaattcagtctttctgagggtagaaggttaacggagttgaaggttacttttctttctttttttttttttcttttttttttttttctgagatggagtttctcccttgttgcccaggctggagtgcaatggtgcgatctcagctcactgcaacctctgccccctgggttcaagcgattctcctgcctcagcctcccgagtagctgggattgcaggcatgcgccaccatgcccggctaattttgtatttttagtagagaaagggtttctccatgttggtcaggctgatcttgaactcccgacctcaggtgatccgcctgccttggcctcccaaagtgttgggattacaggtatgagccaccgcgcccagccttgaaggttacttttctagtataaactaaacttgatcttggaacaaaattccttataatcaatttttcagttattgcatattattttcttagtacaattctaattctgctgactacagagtcagaaagggtttaaaaaccatggtgacaggtggtctcccagccagagctgtggttttggaagacatgaggaagaccacaactcctgaactaggatgggggttgggatatggagaggagaaggtggacagatggatgcagaagcagagtggctgacacacgctgcaacacagatgggtctgaggatgcttcagtgagtgaaatcagcccatcaccaaagggcacgtgctgtgtggtggaggaacatagtcgcatgtgtgttgttgggaggtggagtttaaggtggaagaacctctttgagggcaatttggcagaatccatcaaaatggattccacctgtgtgcagagaggtgcatgggaggacaattatcgcagtactgtttgtgataacagaaaactggaaacaacctaaacgggctgctgtctccatccatgtgatggacctgcatgtgtcgtcagagaacaaagtagcgaatggtgatggaagtaaagctagcagtgacaaaatatttaccacgtgaccgacattgtctaagtgcatctaatcttgaccacaatctcatgagttaggcattttgtatccattttacaaatacaaaactaaggcagcaagaggctccatgactgctcagagtcacaccctagtaagggatagagctgggactgaactcctgctgttgggcccagcatccagtcccttggtctctacactgaaactgttcatccagatgtcgtgaaggacctagctctatatatcttggtaagggtgcagaacatgccaccatctgcataaaagggggaaatacacatgcatgtttgcataagtgcaagacagcactgtcctgtagaaccctctgtgatgatgggaatgttctatatctgtgctggccaatcctgtagccacaggtggctgctgagcacttaaaagattcctaatgtgactgagaaatggaattttgatattatttaattttaactaatttaaacagccacatggggctggtggctgtcgtatggggcaatgcaaggtagaatatagacagatggatgttaaagaaaagatcaccggattttgtggtttgcaatccctacttttaaaaaaccttctgcagaagcatcattggaagaacgggtttcataactgtttatttcagaaccactaatttaatctagccacttcatttgagagatgaggaaacttaaggcagaaaagttgagtcactttcctaaagtcatattcagctgcgttagtgtgaggaggaaggagcgggtcacagtttggtttggtttgttcctctttagagcatcggacattctcgtttgccaggggcttcattcaatctgatgtcagctcagttcttagcatggccggtcggttcctggaaatggcggctttgggtgaaaccatgtgctgtaagccatgggaactcaactctggcccatgtcaattagcctgcggtgaaactggttttgttatacagcgtgtcaccatttcacttaatgttacagtgtccaagaacctcccaacattaagtgaggacttactataaaagaaagaaagaaccagacttttgtctcctgggctcccagaactccatgaggaatcttgcagtggctcgccctttcctgaagccccagagttcatcctgcctcctgcacaccccaggctcaggctgtcctgcctgcctgcaccacagcatgggtgaaccatggtaggaccatgcttccctgcggtgtactcctcagcgcctcacacatggagggctttggaaatgtttgtgtggactctactcccagcctcgagggctgaaccgctagtgagttgtgcagatggctcatgaggagatttctccaacatttccttgagggagctgctggacacaggtaaacactcagcaaggagcagaatggggcttcagggggctgctagtccactgagcctgggtgactccaggaggagaggagccagcagagctatgcatgaccatgaccttttttagaagcagcaagcaaggaggaagagtggaattaatgaaaatgaggtagccaacttaacagaaaggcagaagaggaaagaaaattccagggaagtgtttccccagaggcctgagcatggtcctaggggtcagaagatggcagggaatcatctgggatccgaggtgagggcacagagaagacctgttctcaggacgccaaggaagaactgggaggcccctgctgagccgcggggcttcgcctgcgttcgggtgctgtgtgaggctagcactgccagtggaactgctgttgggctggaggaagtggacccagccagggggcaggaggtgttggccgcaggcccatgcttgcaaggcaaccagaccctgtgtcacaatgccaaagccagttaacctcggggaagaaacgccgtgggtggggacttctgagtgtttgtcaagtgaaaatggaggaagcaagaaagacagggccccagctgctcctgagatgtgtatcttctgtgattctgtctccagggagggactgtgcagcatctgcctgaacatctctgggacacagccgtcctctcgccataggaaggctcttgtccacagaggagtaaagggaagggcgctgcttcctgcaccagctcaccgtggccgctgtctccattttcgcagtctcaaaccctcggtgctttcagtgtggataaaagagtgggaggaacatttaaaaagtgaattattccaaattagtctctaaatttaatgcaattccgattaaaatcccaacagactttctttattcttgaacttaacaaagtaattaaaaattcacctggaagaataagcaactaagaagagccaaaaaagtttagagaaagagtgctgatgaaagtgggttgccctgcctgactggaaaggtgcaatgaagccacggcagaggagacccccttcacacgtcattctgcccaccgtagcgttgcagaagcaaagacacagtggaaacagccatgagcatggcccctgcagctcatgtttcagaatagtaatgacactgacttgaacgggttgaggaggtctgcatttttttaaatcttaaaagataagtagaagttgtcagatttgatttgggagataatgagccatataaaatctaaagtagaaaaataaataattggctgggtgcgtgcagtggctcacgcctgtaatcccagcactttcagaggctgaggcaggaggattgcttgacctcgggagttcaagaccagcctgggcaacatagtgagaccccatctctaagaaaagatgaaaaaaaaaattagccaggcatggtggcttccacctgtagtcccagctactctggaggctgaggtgggaggatcacttgagcacaggagattgaggctacagtgagccctgatcacactattgcactccaacctgggcagcagagccagaccctatcttagaaaaacaaacaaacaaaaaagattaaagcaataatatgaacaggagcagaaatggaaaggcattccaaggaatcccagagttattccatgagggacaaaaggtagctttccgctgccagagatgtgacttgccctttgcagcaaatataaaagaagtcacttcaggcattctgattgtctgtagctgtagagcaaaccaccccgaaacagtggattacaataacatcttcattaaccttatgaattaaatgtctttaatttttgccagtttgatgagtgaaaatgatattttaccgtttttattttctggtgagactgaacatcttttcatacatttcagactatttgtatttcctcttcagtacattacaggttcatttctctgccaatttttacttgagttgtttgtctttttctttgagacagagtcttgctctgtcaccctggctggagtgtagtggcacgatcttggctcacctcaacctctgcctcctgagctcaagcagtcctcccacctcagcctcccaagtagctgggactacagctgcatgccaccacatttggctaatttttgtatttttttggtagagatgaggtttcgccatgtttcccagactgttctcaaacccctggcctcgagcgatccacttgcctcaacctctcaaagtgctaggattataggcatgagctaccatgtctgtcctctttcttattgattacaggaatatattttgagtattagtcgtttgctatacatatattggttttaattttgtcatatagaaactttctttaagtcagatttcttaatcctttcctttatactttttgcattttgtgccttagatggctttctttccccaggattataagcctattcttctatatttttctttttataatgttataattttggtttttaagcttagccatctggaactcatctctaggaaacaagcgatgcgagactaatccctgggagaagggaaactcctgcagtgatggccagctcaccagctctctgcctgggaacaatatccacttcccagtgcagggagctggcctctgagcagagcacagcagccccactggctgaggaggcggtgatcagagaggggcagccaaagctgcacattttatggaatggggcatcagaaaggaggatgctgtgaagatagggggcccaggagtctatgtgcaggtctccacaagtcatggccaagggttgtgctgtccgtgtgcaggacgaggccactcgaggtttaccagatagtctgagatcagaacagaggtactaaaactggatgtgtgtgtacacttgtcccaggcaaggaccgaacactgaatgcacggcagggaaggagcacaggctgcatttgctgagatttcacatgaaatgttatgtgtgcatttgctttgtatcctctctgaccagaccttcaaagtaagtgtgatcctccctgggcttttattgcacatgctgagctccagtgaggaatgagctgcttttatcctctgtgatctgtaaactgttaaactttccaaaaactaaaaactcaatctgattccacagctgtgataataaagaccaattgggaaaaccccagagagattcagggagtgagactgtttagatcaccatgagcctgagacagctggttcctgcaagaatgaatgtacagcattttctaatcagtctcctgcctttttcccaagaagctttgcttttttctttttgacttttgcagttagtgtacacagagtcagttcattcacagacacctcatggaggcacctggaggtccttggtgaaggtaaagaagtactgggaatgcagccacggaatccagctgtgtcctcgattgaatttagcacagtacacaattcagtgtgtaccctgcagcttgtccccccagtgattgatgttttttaccaaatgttaataaccaaggcaaggcaagtaaccaggcaaccaaggcaagcgaaagcatcttctagaagcaaatgcgcaggctgtgtggttttgctttgccctgtcctgctgcgttattcatgagtgctgtctctacattcccccgtctgcaactttagtacaacctcaacactctgggaagatattcttggatatgcactaaaattagatttttaccttcccatgtgtaattcaatgtcttcatttttctcaaatgacttttgcttcattgaggtggacaaaattctgtatcttactttttttttttcctaaaccctcctagagacctataaccagttttggagatggttggactgttacccttttattaaacatctaagactttcatcaaaaagttccatattccactcagaaatattgctaaagtatttatatcctgggaaaagttaatttgtaattagtaactagcatttccctgggtaaaaataatcagcaagtttctttctgtttttgctccactttttcctccccaaaaatcttgtacataaattccaaatgttagtgttcagagtggacaccacactctagccccttaagacaatcagggtccttccctccttgtttccttcttccctccccctccctgtcctccctccttctctctccccttccctccctccctttctttcttccttccttcctttttttttttttgatagggtctcgctctaccacccaggttggagtgaagtgatttgatcatggctcactgcagccccagtctccccaggctcaagtgattctcctgcctcagccttcccagtagctgggattataggcatgcactatcatgcctggctaatttttacattttttgtagagacagggtcccgccatgttgcccaggctagtcttgagctcttgggcttaagcacctcctgcctcggcctcccaaagtgctgggatttgtgagccatcgcacatgacctcctttttaattgaggtataacatacacatgtgcatgggggatgctcacgaggtgacccaggtctagaaagcacagcattcagccccccagaatcctcttcatgttcccctggttaccagcttccactcaaggataacaatgatcctagtccgttttattcagggatgaatatcaaggaaaataccagaaggtaacagcctacagaatgcctgctgggctgcttttcattttcttctcatggttcttttgatgaacctctgagtctcagatgagtggtccttgggaaaagaccttaccatactaacatccctggggtggtctgtgtttcttcttagttttggctgcttctgtgagcattgaggactgtcgcgcagcagctcagccagatttcacccctctctactttaaggcctgtgccagctctagtcatcccctcgccaaaaatgagacttttcacctccatccaggggtaggtcctggagtgagttctcagcttgctccctggggtgcctaggacttgcccggccacccatgtcccacaaactgctgtttttctgcctggtgcccagtatattggccctgcccacacgagtaccttgctgccatggcttccttgacctctctggtcactgcagtgggactggatcttaacccacctacctgggacccacagaccttgcctagctcctggctgcccagggctggatgcttttccagtccaggaaaccagcccccaagagactggtgaatgatggcatgatcccatcgctgctgcctgcctcttccctccaacccccacgaactggcccccagggcccaggctgcaggagctcctggaaactgtgctagccccaagaaagtcctggctcctggaggactgatccccttgcactccttaggccatcggctgccgtcagcagcctcccctgcctcccctgggctctgctgatgagggtgcaacacactgcatagctcatagcctctgtacgtggtctgcaagggaacagtaatttaaatgacatggctttggccgggcgcgggtgctcacgcctgtaatcccagcactttgggaggccgaggcgggtggatcatgaggtcaggatatcgagaccatcctggctaacaaggtgaaaccccgtctctacgaaaaatacaaaaaattagccgggcgcggtggcgggcgcctgtagtcccagctactcgggaggctgaggcaggagaatggcgtgaacccgggaagcggagcttgcagtgagccgagattgcgccactgcagtccgcagtccggcctgggcgacagagcgagactccgtctcaaaaaaaaaaaaaaaaaaaaaaaaaaaaaaaatgacatggctttgaatgaactgagagctctgataaagcataactcaattcatctcttttctgcaagtcatcttccatccatgtggaaagtgtgaatgataccagttgtgccacattgatactgaccccctcgttcctgaaaatacaccttagagctcatgaaagcacaccccagttactggaaaggaagccacttttgttgtaagcacagcagcagagcagcctctgaggtgcacagggctctgcaggttgctgcttggccttatgtctgagtaaggcctaagtacacatagctttttttttttgttttatttctgagaaatttaattattttagttctttttttaaatcaacttttattttaaaatttcagggtacatgtgcaggatgtgcaggtttgttacataggtgtgccatggtggtttgctgcatagatcaacccatcacctaggtattaagctcaacatacattagtgattcttcctgatgctctccctcccccacccccaataggccttagtgtatgttgtttctctccatgtgtccatgtgttctcatttgttcaccttccacttataaatgagaacatactttgtttggttttctgtttctgtactagtttgctgaggaaaggggcttccagctccatccatgtccctgcaaaggacatgatcttgtttttttatggctgcatagtatggtgtatatgtaccacattttctttattcagtctatcactgatgggcatttgggttgattccttgactgtgctattgtgaatggtgctgcagtggacataacgtgtgcatgtatctttataatagaaggatttatattcatttgggtatataaccactaataggattgctgggtcaaatggtttttcttctagatctttgaggactacaaggaacttaaacaaatttagaagaaaaaaaaacaacatccccattaaaaagtgggcaaaggacatgaacagacacttctcaaaagaagacatttatgtagccaacaaatatatgaaaaaaacctcaacatcactgatcattagagaaatgtaaagcaaaatcacagtgagataccatgtcacaccagccagaatggcgattattaaaaagtcaagaaacaacagatgctggcgaggttgcagagaaaaatgaacacttttttttcttttttgagacggtatattagtccattatcatgctgttgataaagacatacctgagactgggaagaaaaagaggattaattggacttacagtttcacattgctggggaggcctcagaatcatggcaggaggtgaagggcacttctttttttttttttttttttttttttgtcccaagacggagtctcactctgttgcccaggctggagtgcagtggtgcgatctcggctaactgcaacctccgcccccccgggttcaagtgattctcctgcctcagcctcctgagtagctgggattacaggcgcctgccaccgtgcccggctaatttttgtatttttagtagagatgggatttcaccatcttggccaggctagtcttgaactcctgacctcgtgatccacccatctcagcctcccaaagtgctgggattataggcatgagccgccgtgcctggctgaaaggcacttcttacatggtggtggtggcaagagaaaaagaggacagaagcaaaagtggaaacccctgataaactcatgagatgttgtgagacttattcactatcacgagaatagcatgggaaagactggcccccatgattcagttacctccccctgggtccctcccacaacacttgagaattctgggaaatacaattcaagttgagatttgggtggggacacagccagaccatatcagatggagtcttgctctgatgtccaggctagagggcaggggcgccatctaggctcagtgcaacctctgcctcctgggttcaagtgattctcctgcctcagcctcccaagtagctggtactataggtgcacaccaccatgcctggctaattttttgtatttttagtagagatggggtttcaccatgttggccaggctggtctcaaactcctggcctcaagtgatccatccgcctaggcctcccaaaaagtgctgggattaacaagcgtgagctactgtgcctggccaaaaagggaacacttttatactgttggtgggaatgtaaattagttcagccgttgtggatgacagtgcacacggctttgaattgtcccccagctgcactggactgggagttgctggtgctcctgatgctcagctagaattagagataattttagatggcaactaggggactcggttggggttgttccactctgagatgaaagggaacgtctttatttaggagtataatgttcttggagcgagtgttatgtcacaaaccatagttgggtggcctctacctctgccaacgtcagcaataaaaagtctgaggcagggaaactttttagagagaagaagagtgtttcctgatcatgggcttgggcttgtctacctgactagatttggacttttataataattcttttttaagatggtacacattctcctttttcctgtgttgtttctctgtggtctcactgctgcagtgccaggatctgcattcaaatacggccgagcccccagagcaccaccagtgcagtctgtcctgaggcactggactctcagagctctcctgcgggtttcagtcattttgtttggtttttcaaccatggctttgatcttgccagactttagtctcaacctgtgacccatttatagttacagatcaagaactagtggtcactttggcaacatacataccaacatggaaatgatacagagaagactggcagggaccctacacaaggaaaacaaaaaaataacttttttttttttttttaaagagagtctcactctgtcacccaggctggtgtgatcatggctcactgccaccttgaatgccagggctccagtgagtctcccacctcagcttcccaagtagctgcaactacagacatgcaccaccacacttgtctgatttttatttttatgtattttatatttatttttttgagacagggtttcactctgttgccctggctggagtgtagtggcatgatctctgctcactgaaacctctgcctcctgagttcaagcaattctccctcttcagcctcctgaatagctgggattacaggcacacaccaccatgcctggctaatttttaaatttttttggtagacgtgaggtttcaccatgttgcccaggctggtctcgaactcctaacctcaagtgatctgcccaccttggcctcccaaagttctgggccaccactctgagcccaaaaactattcttgacagtgttcaatgaactagcatatgggcgccttcttggttgtgggagatggtggcattgttgagcttccggatccatctgacctctcaaatgcttctgaagattttgcagatgaagaaaaatgctgttttgtatcagaaatgatagaagatgtaagtgtgtatataatgttctcatgtttttggaaaagaaggatttagcaagtgttaaagtgaatttgggaagggagcgaggaagggtgagaaggagaacctggcccgtttggatgcacaagttccttggggcggtagcattcaccagtgcagagagcagtgccatccaccccagagtctgttcctggtgggcctggcctggcctcagaaaatggggttctagtttctttaactgacaagaaggaatcaaagtttcaccactcactcctctagaatctgccctctcccaccctcagcctttcctttcactcttgtcgaagacatgaattgagcaagctgcagggcctctttcagcagggtctgctggcagtgtccactgcaaatgggacatgtgcttcagaggcaaatggagctggcgttctggccctgactctggcgctagaaatatttctttttgttctggctttcttatctgtaaaatgggtataacactagtcaccgtgcatggctgtaaatgagaaaatgcacagtgacaggcttatcacaggcactcagcaaatgccactgcccttcccagcccaccattttttttttaaaagacggttttgctctgtcatgcaggcgggagtgcagtggcatgatcttggctcactgcaagctccgcatcctgggctcaaacgatcttcctgcttcagcctcccaagtagctggaactacaggcatgtgccaccacacccagctaatttttgtatttttagtagagatgggatttcaccatgttggcctgtccggtctcaaacccctgagctcaagtgatctgcctgcattggcctcccaaagttctggggttacagcgtgagctaccgcacccagccaagggactcatacttaaaggactttggtcttgctcattgagcatttggttttctatttaaaatgtggtctttctgttggaaacgatctagtatccgtcagcattgctcttgggaaagaacacttccaggcagggcaagcacttgccttgtgtacacagatgccttgagatcagcataatgtaaacgtcaaaacgggtttctggatctaaagcctggcttgctttcttccaggtcagcagtgcaagagatgggtttggagatagggtcgcagccagcctgtgcgtggcagaggaaggaagggggagctgagtactggcaggggccacagtgctctctgcccttcccaagaggaaagcagaaaccagaccctctgttagaggccctccttgttttcaccttcccagggtttgatgtccataacatctggtttgaatgattccagcgaactggatggggcaccccactgccccaccaccgcctgttttttcatctttttttttgggggggggacggagttaatctctgcaccccagctggagtgcagtggcgctatctcagctgactgcaacctccacctcccaggttcaagcaattctcctgcctcagcctcctgagtagcggggattacaggtaccagccaccacgcccagctaattttgtatttttagtagagttgaggtttcactacattggccaggctggtctcgaactcctgacgtcaggtgatccgctcacctcagcctctgtaacctacaaacctcttcagaaagtgtaaaatgaaagcatttccccatttctaaagcagtgtccaggtttcatcaggtagctgtcgaacccaaagagactttgaagccaagagtccacaggatcagcttcccagtggccccagaagttacaagatggggccctcccaacaaaaggcatcctcaggcttttacgtaatgctggtgtgcttagcgactgctgaaagttgactgtgcttgtgtcgtgaaagccaagatgaagagacgttattatggttgtgtgttgctttcagctagatactcctcgctggggaaatgtaactgcaaagcagactccaggacactgtcttcctgaaagccggtgcttttgggggacattctggggcccaccagggtcatcctggatgctgactggaactgagaagaggtttgctgggaagatagggacagattctttgtatctatgtcattcaggtaaaccctacatgtgacatgtgacaccatctcttttgacctcagtttcaaatgagatatttgaccaaccttattgctaagggtcaggctagcttgaaataaccctcaagaaatctagataaaaacctaaatgagattataggctttttttttttgcctaagattatttgcttccagaaccctaaggaaacttcacaggaaacatggtaccatattttagtacacatctccatcctatgcatgttctccagaacctcttcacacacactttgaggagagttccatcaaacctccttctcttattccatcttaatgtcatgcattatttctcttcatcctgcctctccttttcagttacaaattgattctgatagaaacaccctaaatgaccttcccagggcagtcagagagttaacttgttgtagggttgcatttggccatctgggcagagggaggaaacagtggtcagtgtccaccctgtgggagggaggcagcacccaccacagctttccaactttgctggcttcacatttcccaggacagggcaagaagaggaagagctcctcagtggctgtggggagagtgcaggaaggagccctagacttgcccatttcttcttgtcccaaaacccaacacagacctaaaactcagccaagcccaagctatgccccgcttctgcaatctcttgcaaggcccctgcttaaacaacctgagctcccagctttagtaggcttgggaacttgatgcttcatttgggacaaactttgtggatccagggaagaaaaccttgttggggtgagcaggtggccgacaggactgaggatctaagaggtggggatgcactggagtccccagctggcctaggggaccggtacaggagtcttcagaagccaccatctcgatgggcagggacttagaattgaattttttttgtttttgttttttttgagacagaatgtcacctaggctggagtgcagtggtgcaatctcagctcactgcaacctctgccttccaggttcaaggcatttgcctgcctcagcctcccaagtagctgggattacaggtgcccaccaccacacctggctcatttttgtatttttagtagagacggggtttaaccatgttggctaagctggtctcaaactcttgacctcaggtgatccacttgcctcggccttccaaagtgttgggaatagaggcgtgagccaccatgcccagctagagttggattttagtttccttatcactgtgtaccaagcagctgctgggggctgcacccatcccgatggaggagcttctttctccccatgcagcctcatgctccctgcttgtttggtgtgctgacggggctgctgaacaggacgggttttcttttccccctgagaagcctcctacattgtggggagaagagtgtggtaggaagagcaatccagagacagtcttgtaggtctttaagaccttctcatcttggtctgcttgttgcgaattggggttatacagagatggtgatggtggtagtgatgacggtggtggggatgatggtcatggttatgaaggtaatgacgacggtggtggggatgatggtcatggttatgaaggtactgatgatggtggtggggatgatggtcatggttatgaaggtactgatgatggtggtggtggtagtgattcctccttgaccaaataagtctgggaaatgctggcatgtacaaaactaatcaggtgggttaatttgagaataagatatctttgagcctttaatgactctcctgagggatggacagaaatcctctactgttttgagcactgaaggcttttcctcaatactattctgtgaatggatttgggcaacaccaggccattcctggtaccaaaacaaaatgtactctgagcaaatttgggaagtttattcttatgttgccttactgaaaaatccaaaggtagattcccatctattattattattattattattatactttaagttctggggtacatgtgcacaatgtgcaggtttgttacataagtatacatgtgccatgttggtgtcctgcacccattaactcatcatttacattaggtatatctcctaatgctatccctcccccctccccccaccccatgacaggccccggtgtgtgttgttccctaccctgtggccaagtgttctcattgtttagttcccacctatgagtgagaacatgcagtgtttggttttctgtccttgtgatagtttactcagtatgatggtttccagcttcatccatgtccctacaaaggacatgaactcatcctttttatggctgtatagtattcgatggtgtacatgtgccacattttcttaatccagtctatcattgatggacatttgggttggttccaggtctttgctatagtgattagtgccgcaataaacatatgtgtgcatgtgtctttatagcagcgtgatttataatcttttggatatatgcccagtaatgggatggctgggtcaaatggtatttctagttctagatccttgaggaatcaccacactgtcttccacaatggttgaactagtttacagtcccaccaacagtgtaaaagtgttcctatttctcaacatcttctccagcacctgttatttcctgactttttaatgatcaccattctaactggtgtgagatggtatctcattgaggttttgatttgcatttctctgatggccagtgatgatgagcattgtttcatgtgtctgttggcagcataaatgtcttcttttgagcagtttctgttcatatcctttgcccactttttgatggggttgtttgattttttcttgtaaatttgtttaagttctttgtaggttctggatattagccctttgccagatgggtagattataaaaattttctcccattctgtaggttgcctgttcactctgatggcagtttcttttgctgtgcagaaactctttagtttaattagatctcatttgtctattttggcttttgttgccattgcttttggtgttttagacatgaagtccttgcccatgcctatgtcctgaatggtattgcctaggttttcttctagggtttttatggttttaggtctaacatttaagtctttaatccatcttgaattaatttttgtctaaggtgtaaggaagggatccagtttcagctttctacatatggctagccagttttcccagcaccatttattaaatagggaatcctttccccgttgcttgtttttgtcaggtttgtcaaagatcagatggttgtagatgtgtggtattatttccgagggctctatgctgttccattggtctacatctctgttttggtaccagtaccatgctgttttggttgctgtagccttggagtatagtttgaagtcaggtagcgtgatgcctccagctttgtgctttttgcttaggattgtcttggcaatgcaggctcatttttggttccatatgaactttaaagtagttttttccaattctgtgaagaaagtcattggtagcttgatggggatggcattgaatctataaattaccttgggtagtatggccattttcatgatattgattcttcctatccatgagcatggaatgttcttccatttgtttgtgtcctcttttatttcgttgagcagttgtttgtagttctccttgaagaggtccttcacatcccttgtaagttggattcctaggtattttactctctttgtagcatttgtgaatgagagttcactcgtgaattcggctctctgtctgttattggtgtataggaatgcttgtgatttttgcacattgattttgtgtagattcccatcttatcacaatcttcctcatctgtgatactgcacagtttgcaatagttcttgtttattactacttttctctcctgcagaacattgacatcaccaatttcagcagcagctggagcgatggcctggccttctgtgctctgctccacacctacctgcctgcccacatcccctaccaggagctgaatagtcaggagaaagtaagtcatggccctgtcaccttggttatcctctaagaaatgcaggagtcctaattgataaaccccactgtgggagggggcttacaggcctgaagtagaagttgggatattgataccaggtacagataactcctgaatgtttgactgcaccgtggaatcccatcctcagcaaatcttcctcagtttcccttctcaggaatctcagcttcatggtttcaagaccttggccagcatttttcaaagcctattccaaagaaccagcaagcaccaacaaaaagaattccctgttcaaataagtcttggacactgtatattgcatcacattttcagagagcatggtgcctgttaacacattaaagacttcaagaagtcctacattaagaaatctatgtgactgtttaacacagcatagatcagatccacttaacctctttacttatatttgtttgttttactacaatcacacaacaagggttggcaaattttccctgttaagggccacgtaatagactcagtgggtcaggtggtccagtcacaactgttcaactctaccatcgggctaaagaggccattgatcactttgtaaatgaatgtgcatggctgtgtcccaacaaacctttatttacaaaaacaggctatgagccagatttgggacagcagtttgccaacccctgacctagaacctcctacaaaatgtcccacagagcatactttggaaaatactgtgctgggtcccgctgttggtcactcaagaatttcttgtcaagcatcgggcactatcataagaaaacaggcaacaatagagacgttctatgccctcatgagctagacagataataagcaagcgagtagacttataacaagtaaaattataaattagcaaggataagtggtctaagagcccagagagaaactcagtgctgtgagacagagtgacggggatcacatttagaccagggagactgcagcggtgatgtcagaactggtgttggggctgggcatagtggctcccgcctgtaatcccagtactttgggaggccgaagcgggtggatcacttgagttcaggagttcaagaccagcctgcccaacatggtgaaactccatctctactaaaaatacaaaaattagctgggcatggtggtgcacacctgtaatcccagctacttgggaggctgaggcaggagaattgcttgaacctgggaggcagatcgcaccactgcacttcagcctgggcaacagagcaagactcctcaaaaaaaaaaagaaaaacaaactggcattggaaggtagaggaggcagcagtgcagagccagggctatggagcagcagcagctggggaacaccttggtgttgtccaggccgtggaagaaggctggttggctggatgcagttagtggggccagagaggctgtgctgatccagggaagtggagggggcagacccccatagctgggctgatctggggagtctggggcgggagaggcgacagagcttccccacagctctggtttggcctcacccactaaccatgagggtggtagcaacgcagacggaaagacatagaaggatttgaaatatgtctcagacagaatcaactggatttagtgacagattggttgtaggggaggaggagaggaaggagtcaaagatgacgccctggtgtctagtttgaaagggccattttctgagatggggagggcatagatatgtttaaaagctctgtttcgattatcccacatcaggatttaaataaagtacaaagaaggatcatagcaatgacaaaaactgagcaaagtaatttaatttttaaggtgttagaattctccaaaaaagcagaaccaaaagagagagagagagagagagagagagagtgtgtgtgtgtgtgtgtgtgtgtatgtagagagagagagagagagaggtgggggctggggagagagatttattctaaggaactagctcgagattatagaagctagcaagtccagcatctgcagggtaagccagcaggctggagactcagggaagagctgatactacagtcccaatgtgaaggccatttgctggtggaattccctcttcttcagtgaggttagccttttcttttaaggccttcacctgattagatgaggcccacccacactaactggggtcatttgctttgccgaaagtctcctgctttaaatgttaaacttgggccatgtgtgggggctcatacttgtaatcccagcactttgggcggctgagacaggaggatcacttgagcccaggagtttaagaccagcctaggcaacataggcagacctccatttctacaaaaaaaattttttttcaattagctgagcttggtggcgcacatctgagatcccagctactcaggaggctgaggtgggagaatcacttgactctgggagtttgaggctgtagcaagccatgattgtaccactgctctccagcctgggtgacagagaccctgtctcaaaaaaaaaaaaaaaaaaaaaaaagaaaagaaaaaaaaccttcacagaaacatctagaataatatttggccaagtatctgggtgccatgcctatccaagttaacacatgcaattaaccatcacagaatgtattaaaatatttaaattacttttctgtggggtgctttgtttgtgaagcaggctgtacaggattattaaacattctgggggaaagattgtatttaaatcatgtgaagtctgaggggctgtgaaatatgcaggtggtgatggcaggcaggcgattgcacagcaaatccggagctggatgggagagcagagcttgaaacacagatctgggggtcgtccatgaagagatccatgctgtctaatgcaggttcctgggatgatgggaatgttgtgtatctgcactgcccacagggcaaccaccaaccacacctgcttttgagcacttgaaatgtggcagatgtgactgaagactgaatttttaatttcaattttcatgttaaataaccacatcatgtgtggctgccatgttggacagcatgggcacaaatggaatttaaagccattaagagtggaggagagcacccagtcccttggtcttagggaagcatacagagggaggaccgaggaacacacctgggaaccccagtgtttgttgtggaggtagaggaggaggacacagcaaaggggaccaggaaggagcagccagagaggtggcctgagctggggccacaggcttcagcggcctcacgggtcacaggtgtcatctatgcatttattccctccctgccctcttgatgtcttagtgtctgcttttctgatacgatgttggagagataactgaggaaatagtgggcataaaagcactgaaaatagtcagaaggcctttctaacactgtgctgggtgaagcccacacatgcacacacctacgtcctcctgacagtgtgtgtgcgtcactccctgcagtcatccagacagactggctgctttgtccttgaatcagcatggctgtattggaaaattatggacctaaaagtgtttgttctcaggctccaaattgtgagccttgcctcctgggccagagcccctgtgtctggccctagtctctgcgattctgagcgcagaggctccgccagctgcccaggcctcccgcagccgtggcagcatgcagtgggggcaggctgaggccatggtataggcccctgctccctacatgcagggttgaatttcttccccagaccaatcacccgaccaccagggagtgtgtaaggcagcgtgtggaagactgtgggtctgtgatgagagtctgagtcagccctggatgtctggaatttttcattttaggatctgtttggcctcacagtaatcttgaattgggttgtgtcccagagcctaggattttatttgctaattacagcccgtttgccactctctgaaggaacaaccagcctcctgtttcctaaatgccccatcctggccacactctggaggagccacagtggctgcagtgacatttcgccacttcttggtgtgtggcttgccctgggggatgctggcgttctttttggtgagagaggccatatctatcacagttacgggtgtgggttttcaaagtaacgtatcccaacaggcagactcgtaccatataaaactgagcacacggggggaatcttactagagcagagaggggaaagagcaggaaagatttcctaaaagtgtgttagaagctgggattcacagggagcaagtggatgtgaatacagcacataccttgggtcatcaggatgagaggcacatgtgtccagccccagcctggagccgtgttcccctatgtgctcagtgccagggcatttttttttttttttaatttacacttacatcagaaagggcaccaagagaagcctttaatgtttgtaaaactattaaaatcaaaatctaaaaagtatgtgatagagttgttgatagcccagaatgtatagaaattatgaggtgtccccacctggatggaagcaattaaactatgtctgacattggtattaagtagagaatttctgataaaaactaacaagcatgtcttctatgatagtaaagagatatatgatcacagggtgcgatttacagtccatgaaagattttgtcattttgttgttgttgttgctgttttgagacagagtctcactctgtcacccaggctggagcgcagtggtaccatctcagctcactgcaacctccgcctcccaagtccaagcgattctcctgcctcaacctctcgagtagctgtgactacaggcacacggcactacacctggctagtttttatatttttagtagagatggggtttcatcatgttggtcaggctggtctcaaactcctgactttaggtgatccacccgcttgggcctcccaatagttctgggattacagtggtgaatcactgtgcccagccatttttgtttttattgttttcagtaaaaagatagggcattcacttgtccgcctttgcaactctctgcttagtccagacggactcaggtagtggactggaccttgcttatgtcagtatctgaaatgaatgaagtgtgaccctgagagggggaactctaggattggcatctttctcccgtcggttttgagtgtgaggcccaacgggcccaacccctcaatccctgctggtgactaagagttttgccacaggttgggcacttaggctgtcctggaactggaaggtcccaggcctgcaccatcatcccccgaccagggcagactgaagcagtgatggcgtcaccctgcccggctcctgtgggctgagctgcatctgaagcttacagcccgtgggggaagtgaggcccttcggagctgctgcttgtctgtggcttctgcctcccaggtggcctctgcacagtggtggtgacagtgatcaaatgaaagagcattgggataataacacttggtcacagatgttctgctgctgcaaaaatgaataaaagttactgttgtgaataaaaaaccaccccctctctgtattctatgtcaccctgtatactatttcagggtattttgagacagtttttcatcaagggatcctcccacctcaggcttcagagtagctgggattacaggcatgttgccaccacgtcttgctccgcttgtgttttcacaacagatactgaacatagaagaaacagcatgcagcacactgtgaaaacacagcggtgccaggcgttgtggcaacatgcctgtaatcccagctactccagagcctgaggctgggggatcccttgagcccaggattttgaggctgcagtagtgagcccatctaaaaaaaaaaaaaaaaaaaaaaaaagaggaaagaaaacaagtggtttcattagaatcaaactagaaggtttttgcataaaacgttgagtttaaaaatgctttctcgttagaccttactagtaatcaatacaaattaaaacaataaaatatttttagcctgatacatttggcagagacagtacaggaaaatagccacttatacactattgctggagccaaaaattggggtaacgctctagaaagcaatgtttggcattacatattaaaagccataaaatatttgacttctggaataatggtggcctaaaaactggctaaaaaccaaaaggactgaagtaaacacaaagacctcaatagcaccaaaataggagattgctgccattaatttgggctaaatggaaggaagccaggagttcacagctcccctctcagcagaacagagtagtgttagggtaacaagtgtgcagtttccagcccatgcccgctcctttcctttaatttcaaggaaggggcatggcagcttgggcaggatcaccacagatcaacagctttccaaggcatgggccacagactggaagaaaatgtggtggctacatctttctgtttttttggtgacctggtgcctagagtttgcttcagtgtcagggaaaacccgtcgcttcaggctctagatgttcaagcaagggtagagagtgagagccgtgggggaaatggaaaagggtataaaatgatgtatgaaatctaaaatacataattatgtataaaatctaaacatacaaaattaagaaatttggacaggtgctgtggctcacgtctgtaatcccagcagttcggaagactttgacaggcggatcacctgaggtcaggagttcaagaccagcctggccaatgtggtgaaaacctgtctctactaaaaatacaaaaattagccaggcgtggtagtgggcgcgtgtagtcccagctactagggaggctgaggcaagggaactggttgaacccaagaggcagaggtggcagtgagccgagatcgtgccactgcactccagcctgggtgacacagcgagactccatctcaaaaaaaaaattaagaaattctactgaggaacataatggccaggtgccatagctcacacctgtaatcccagcactttgggaggctgaggtaggcagatcgcttgagcccaggagttcgaaactagcctggtcaacatgacgaaaccccttctctactaaaaatacaaaaaaaaaaaaaaaaaaaaaaaaaagccaggtgtggtggtgcatgtctataatctcagctactgaggtaactgagaaacgagaatcacttggacctgggaggcagaggttgcagtgagctgagctcaagccactacactccagcctgggtgacagggcgagattccatctcaaaaaaaggaaatttcactgaggaacttaaaactgaatatgtagagaaacatttatatctcaattatacttaatataacaatttaattttaatataatcctaataattttgaaatgaattttggaatgggagaagcatgaacaaatgattcttaggttcatctagatgaacaaacatcagagaatagccaggaagagtccccaaaagaagccacacactagggctgaatgattgtggagcactaccattaacattctaaggggaaattattttcagcctcagattccctgtccagccagcctgttaactgaacgtgatggtagaaaggagaaattttcatacatccagaaaatgtgtctccccatattctttcttaagaaggaacctaggcaatagaatgggggtaaaatccaaaaatcagtgaggttctggagggcttggggctgtagggtttcatagaatgatgagatgattaagagctcgaggctgtgataaaggagaagatgagaaactgtgcgaggaagccagggtccaactatgaggcaggccctctgtgtcagaatagaatggcggcagccacaaggagaatgttaggacttaaaagcaacagtcagaatgggcaagaggccagatgagaaggaggcacaaagcccccctcccagtaaggaaaaccccaaacaagcagaaactgtaggaaaaaaacaaacttttgaagaaaggcagggtccaaatctggggcacactaaaatgtggggtgattttgggcgactggtagagtaacagaggaactcctttaaatgatgctttgagtggctcaggtcatgatggtggagctgtagaggacacgtgcccacagctggcttctgtgatgccgcttgtggttttcagcttccagaatcattctagtcagagagcgccgaggacttaaatgtgcttccagggaaggaagcaaaggttctcagctgtgacaatgtacaacttgaccaggtggagggaagaaagggtaatttactcctgacatacaaagtagagtcaggaagtgttgtccatacccagtgggacaaaaaatagaagttcaaggatattatttaaggtcacaaacatagctaatattaatacgggcactaaaattagctatgtgtctatagtgtaaggaggaggcagatgcatggtgcctgagtcctcatatgtcctggaggaagtcagtagaaaatgccttcattttagaaatcaagtagtagtcgtattagcatattacagagatacggaaataatccataactaaacagaaattgaaaggtagttctctgaaggaccaggattgaaggaaggaacaggttttcatttgatttaaatacaatctatatatactataatatatgcatttattactttgataatttttttgatatagcatcatgattaagcaactttgttatgcaacagaatgtttatgccataaatcttgcaaagtatgaattacctaaatcttgacaaaggtaaacaaaaatttatctttgataggtgtcaatcagtaatgttagttttggtgcagttgcaacctgttgatttttttttttcttaaactgagatcaaatattgtacacttgacttactattcttcgctttataatagtgaataatctatatgggaatatcagttgatattctttcctggcaaaagctatatattttaaattactgattccagtctctttgtctttttaacttagaagaggaatctcttgttggcatttgaagcggctgaaagtgtaggcatcaaacccagcctggtacgtatcctattttgtatccttgtgatactttaattgtatgagaaatgactttatgccatctgataaacagtttctcgtagaacattgacatctgtttgccgaaagtctgttgctctcaatacctaatatagagttatccagttgatataatcacatatcaacatatgatttagagattttcaatcgcataagatttcatatggacaaatttcagttctggaaacacagtggactgaattattattagagccctcttgttcagaacacctagaaatctgaataaaatgctatgttaaaaaatatcaacacatagctaagctcttaataaagaatgggaaatacccagatgccagaaatgtaaaacaaagcagaaaccaggcacaactgagcctgcaaaactcggcaggggtgggtgggggatggtgggccaagcaagcagcaagcctgcataaagccaaggctcacaacatgctgatcttcttagtgaaagcagaaatctctaaaactccaccagccagcccagggaggtgataaggaagctggtttccacctgggattgtgtgcgcacgtgcgcgcagagagaggaaaaggagagagagaaaagagagagagtctcttgcaaggaaaggaaacagggccagatgaggtttagagtccaaatttataatatctgtgctgcatgaagcccttagtatactcttagatgcaggaagcccctgggctgatactacaatggctgctaaaaagtaacagaacacttgagaaaatgatctacttgagctagtcagcagatatagcaaacaaaaggattatctaccagaacttgagatgataaataagagactaccaaaagactatttaaacatgaaagagataaaaggaggaatagaaaccacaaggaaagaatgattctatttaaaaaagagatttgtaaaaagaatctaacacttctagaaatgaaaaattggaattaagaccacaatatgtgttgccaaactcattagatacagcagaagagagaaatactaaattggaaaataaatacagggagatcacccaaaatataaaagagacattaaaaaatataaaatataatggtaaggttgaattagtatgtgttcagcttcaagaaatggaaaacccaaccagcagttgcttaaaccataaaaatgttaattttcttaacaatagtagttttagaactggttcaccactcagtattgtaatcaaagccccagagtgtctcctctccattctcaccatctttaatctgttccttttgtccccatgcttgttctttgtggttgaaggtggctgccaaacttcagacatcacttccacctacagggcaggaagaaggggaagagagagagcaagtgcctcctatctttccctttaaagaatgaaagtgaaaggctccctgggtttctccagctcattggcagtactctgttacatggtccccagctgcaagggcatttgaggaagtgagcatatgaacagttttcagtttctttagtgggaagcctgcgagggagagagcttgggaatgactgttgggctatctaaataatagtgtctgtctcagagtttaagagacagggacaaaaaaaatcagacaatggccatgtcccatgcccagagggaattccagatgaaaaggatagaaagaatggaatggagacagtatttgaagatatgatgcctgaaaattttccagaatgatgaaaggataatgaaagagtccacagattctttatttatctcaagcaggatgaataaaacaaaatatccatctagacatattgtaatgaaactacagaaaaagcaaagacagataatctattaaaaatttctgctcaccagtaataaaaatacaacctagtaggaaattatcaaagactagaagagaaaattcacagatgatgatgatgaatggtcaatgaggatttttaaagatgttcaatctcattagggattgggaaaatctaagttgaaataaaaatgagataacaattccagctgggtgcagtggcccacacctgtaatcccagcactttgggaggctgaggtgggtggatcacctgaggtcaggagtttgagaccagcctggccaacattgtgaaagcccgtacctactaaagatacacaaaattggccaggtgtggtggcgggcacctgtaatcccagctactcgggaggctgaggcaggagaattgcttgaacccaggaggcagaggttgcagtgagccaagattgcaccattgcactccagcctgggtgacaagagcgaaactccatctcaaaaaaaaaaaaaaaaaaaaaattccataaccctcaaagcatgtggggaatctgagaaatgaaaaagtgaatgtacatctattgtgaaatcttaccaccatgaacagtgctatgccagtgtaattttgaaacagaatggacagttttctagaaaaatacaagtatgtttcttcaaatattaaatgtaaatattcctatgaaacttaagaagacataaaactttaaccattgaagaggttgaatttatgctttaaaatgtagtcacacacacaaagaaaaaatatccccatcagcccagattttgctaaatctttaagacgcagatatccctattgtgtatttacaagtctgggaaatttaaaaaggtgtgaggaaacttacacatctgaccagggtggagtagcagggatctcccttcagaaacaacaaaactaaggagtaccaacagagagatcaggtaaggataaagatacaatgagaccttgttggaagattatattttacacagaatacatttttctttgtagtgttgtaattaatatttacttctgtttaaatataatatctttttcttaattttcatctaatgtgctatagaagttagtgagctgggaagtgaatgaggtcattttgttgtcctaattgtcagagccaggggtttcattggtgtggatggtctgtgaggagctgctgacacacatgataattaatctcaaaggcacttaggagtgtttgtgagcactttcccggctttttccaccaacaaaatagaaatttcctacattcttaaatttgcttttcagtaccttgatgtggattggaaaatccagtatgttgaattacacatgacactttaaaactacacccagtcagaagtgacagcagtaatccccaaatcttcagtcaagttctgttgttagattatgccaggaaaattgtcttatatgtttatattcaagtaaatataagtttctggggtataacatattaggatgagatctttatttttataatttcaacttttattttagattcaaggagtacatgtacaggtttgttacatgggtacactggatgatgctgaggtttgggatatgagtgatcctgtcacccagataggcacatagtagccgatagtttttcagcccttgcctccctccctcctttctccctcttgtagtccccagtgtctactgtccccatctttatgtccatgactacccaatgttgagctccatttataagtgagaacatgtcttatttggttttctgtttgtgcattagtttgctgaggataatggcccctagctgaatccacgctgctgcaaaggacatgattttgttctttttatggctgcatagtattccatggtatatatgtaccacattttctttatccagtctactggttttctttctccttttcttttttttttttttttttttgagatggaatttcgccttgttgcccaagatagagtgcaatggtgcaatcttggctcactgcaacctccgacttccgggttcaagcaattcttctgcctcagcctcctgagtagctgggattataggcacgcaccaccatgcccagctaattttttgtattttttttagtagaaatggggtttcatcatgttagccaggctggtctcaaactcctgacctcaggtgatccacccacctcagcctcccaaagggctgggattacaggcatgagccactgtgcccggccctttatccagtctactgttgatggacacctaggttgatttcatgtctttgctattgtgactagcactgtgatgaacataagtgtgcatgtgtttttgatagaacgatttcttttcttctggatatatacccagtaatgatattgctgagtcaaatggtagttctgttttaagttctttgagaaatctccaaagtgccttccacagtaactgaactaatttacatttccaccaagagtgtattcccttttctccacagccttgtcagcatctgttactttttgacgttctatcaatagccattctgactggtgtgagatgatgagatctttaaaaatgaagctctatagtgttccccagatattagaaagtgttctttctcagccaccgtgtaaggagagcatcttagccagcccaattacagatgcaagcaactccccagaaaaggaattaggcgagggacgatatgtgatgtcactgtcataaaaacggccaaaacatgtgtccccagggctgctgtgtctttaccaggccatgtagtccatgagggctgttgctcactgagtgccagcatgcccaccaggacagctgctgcaggactgggtgctggcatgcccccgtggagggaggtcaccatgcagcaattcctgaggcatggctgggcctactctgcaagtgtaaacttaatgagctgtgcttaaatagctaatttgtgcttgattgtgtgacaagcattttgtttttcatatttactgtatgtatttaccattttgggcatttttcatgcaaggacttgttggaccctcatggaggtcctgcaaggtggatgcactctataagaggaaactgaggcacatggcttatgagcgggaaaggcaagaggcaaggccaggcaggcagctccagagcgcatgccgtcaaccaccctgacagctgtgtctgccttctgcacataccttgttagatttagaccttagtggggtttttttttttttttttttggtgctattgtaaatgttattgtttttcttattacaaaatccagttgttcaattggtacataggacagcaatggacttttgtatactgaccttgtatcctgagacttagctaaacctgcatgtaaatgctttgggatttttctaaacaatcatatcatctgcaaataaaggcagttttatgtctccctttccaatctgcgtgccatttgtttctttttcatgccgtttagcactagctagaacttccagtacattttttttttgtttttgtttttgtttttgtttttgagatggagtcttgctctgtcacccaggcctggggtgcaatggcatgatctcggctcactgcaacctctgcctcctgggttcaagtgattctcctgtctcagcctcctgagtaactgggattatagacacctgtcaccatgcctggctaatttttttgtatttttagtagagacggagtttcaacatgtttgccaggcctgccttgaactcctgacctcaggtgatccacccgcctcggcctcccaaagtgctgggattacagtccagtacagttttaaataggacagatgagaaaggacatccttgccttgttcatgattttacggggggaatgttcaggtctttcaccattaagtatgatgtcagctgttggttttttatacatatcctttgctaggtaaaagaggttcccttctcttcctagtttgttgagagttaccacctataaaaactatcttgattgtggaattttgtgtaatgctttttcttcatctgttgatttgatcatatggtttttcttgttcagttagttaatgtgacgaattacatcagtttacaaatgttgaaccagccttgtgttcctgggatgaacctcacttgatcatgatgtattatacttttataggttaatagattgtgtattcatgagaaattggcatgtagatttcctgtaatgtttatgtctagttttggtatcaggataatgttgggatcctggaatgagttgggaattattctctcctcttccattttttgaagagattgtgtagaattggtattatttcttccttaagtatttgatagaattcacaagtgaaatcatctgggtctggtatcttttggagggtcttaactactaattcaaacaaatgtcatgcactataagattgttactaatgcagcatactctgtcttctgaaatgtataacatcttttcacaaattctcaaatatgttaacaatgtactaaatatttttagttcagttatgaagttcaagcatgtaagattgtctgctcaaaactgaatattgattggacttcggagtcctctctgagattaaagacacaccctttccataatacagaggaaagtgtgcagtgtgccatctctcttgtgtttgtaggtatcccttcttttcccagagctcatctatgtccaaattgcatgcccaattcttcatcagttcctttctgtaagtcatgttagcaacactccttggtacggattttaggttgccaggcctcagtctgtgtgcagtcatgactacagccagtgtaggtagaaggagacattctattcttgtattctgtgaaagtttgtttttcttttaaaattgttctaggtgtacctgcacggaatgttctaccaactcttcttccactcctttcccatgactaatgataggctgataattttttagcatcaccagggagcagaataagtgaagtctgttcagattttgaatcaggggatgaatggctcattaacagcctcagccaactctgttaacccccaggaactgatgtgctaagttcagccttacttttccatggcatctctgcttctggctttacatcagggtcctttcctactattctcttttaaccacacagaatccaaattcaatcccaaagttaattattaaatatgtccagtggcacaaatttcagaaaagtttgagtgcctgacaggatgcccaccctcttgcccctccctttctggcctggatgttatgcatgctcattacaagcttacttgcaaaatgaacaaaaataaatcagtcagtaaaaaccagcaaattagcaaaagtaaaataaaaataagccaaaaaatcaccaaactgtattaaataacaaacaaacaaaaaaacacattaagtagtaacaatgctggtaaaataaatggttgcatttgaaattggttcaaggcttttgtgataatcccactcagtaatttatcttgagggactagttcgacagaaggaaacaatactgcacaaagatgctgattgcagagtctgtggtggtcacgaggtgagcgtacactggatgccatgtcccttgtggacagcagtttccctggtgagtgcacattcactagaatggcagcccgcacagtggcacagcagcacggggacccgggtgtgaaatgctcagcccacgtaatggcacagcccacgtaatagcgcgtgcagtgtgctgggagtctggggaattagaggtggattcaaatgtaatttagaaacttggaaatcattttaatagtgaaattatgggtgatttttgctttttaaaacttgtttaaatgctgtcatatggttaaaagataaaagcagtgggaggtcatgttttccgtttttggaaagggacagtatctcctgaataagtgggaggaaaagtcctttaactcatcgctttcagcaccacctgtgctggccttcacgttctgtctgtgtaagtggagggtttccaggcagtgtaagccctaacctggactgaagtccttgaggggaaggggtctgtgatgtcctgccttgtgatctgtcccccattcccttcccctgcaggaactcagcgagatgctgtacacagaccggcccgactggcagagtgtgatgcagtacgtggcccaaatctacaagtactttgagacgtaaccctggagggcctggggcagccaccattgccacctactgcagcttttcctggaagcgcctgattactgtccactgaccctgctctgcccaccacccagctgcctagacttcaaagacaggctcaatccaagtggaccaacacccaaataagaaacagagtgggtcccacgatgtacctgtctgaaatgcaaatgcagctggactgtaaattggggactctttgatctcttgtgggatgcttctaaagagggcagcctccctccttccagaccaagaccccacacccaggcttgttttgctgattatattgggtggctgaacgaacacattatctgcagaaattcagacaaagaacatctccaaatcagtcttttggttgctgttgttaaaaatatcccggctttgcctttatgaaacctttgcccttggctgggtgtggtagctcgtggctgtaatcccagcactttaggaagccaaggcagtaggatcgtttgagcccaggagttcgaggctgcagtgagctatgagcataccactgcactccagcctgtgtgaaagagccagaccctgtctcaaaaaaatgataaaacccaaaactttgcccttgtgaaccctcccttcccccctccccccccaaaaaaaaacaacaaaacacaaaaaataaacatttgttccagggcaacctggaaacgtgcgtgcgcactcagccttttggggaaaaatgggagttctaggtaacaatgttaacacctggaacttgattcacttttagctctcaccatcccttatttgatttattgtagcaaaaggaaagcctgtgagaatgcaagggagcccctggctgctttgctggagtccctgggaggtgccccacacctctgccaccaaagtctgtgtgctcctgagcagctcgcggctttcacagtagggaaaccgcagtcctcgtcacctgcgcctttgtcctcccattcgtttaccctcccgttcacatccacacaggcttgtaccccacagaacttgacaggaggtcacatgtgtgaatggcctgtgtctgctttacagggttgagcaggctgagggtgtgtgcctctggggatgctgggctgacagcaaatcccaacagtatttcggctctggactgatttggcctttagtgcttccccaggcctctttcatcggcatgggaaaagcccttaggggtgggcggtgagggcacatttataactaacaaagaagaatgcagttgccccagcatcctactggtcaccttaagtggcagcagagccctccccagcggtgccccagtccctcagaagtgctcagtccggcccgagtgcccatctggtggctctgccgtgttcttctgggcggatctgtgtgcactacacagcgagtgagggcgtggctcacacagttgtttgagggaaatgggtaatgcccatcccttgctgttttaagtgccaaatagcgtgttagcgcccctccaacaaaggatcatccttccagtgagtcaccgagaatgacagtgactgccattactattcaaagtacatctctgattgctgatctgagccactggttcagagccaggttctagaggctgcaggtccagccccttaccattcctggagaggtaggagctcagtcccttcctccaagccagacctttgcagaggtggcaactgggctgcacgggtcagcagatccctgattctcaagccaccttgagacaagaactccgcccccctgttagtgcatcccagctgcagctctgcatcagaacctacagtggacccttttgaaaacactcttggctgccctagttggttaacttcagaatgtctggaatgggaccagagatgcagttcacatgttttgtaagttctttaggcgactgaagcacagctgcttggagaaccactgaggggtggacaccttcccctggcagccacaaggcaggcagcctgcgggagctcctgagcagctgttgggcgatggtcattacatcacccatgcctttgtatttaaatgaaactcgacacatagaaccaattcaacctgaaagttactacttctgctgattcaggcacttgtttgaagcattttttttttattaaccctgtacttcttctttgcccaccattaaagtgggggaaagtaatatcccaagtagttgagttgagctgttggttgttagatttaagctggaattagtccagggttttatgtggggaggcagttgctgtcttgggatacccggagtgggagtgggtgttttctgtgattggttctgttttttatttttacttatttattttgagatggagtttcatccttattgcccaggctggagggcaatagcaccgtctcagctcactgcaacctccgccgcccgtgtttaagcgattctcctgcctcagcctcccatgtggctgggattacaggtgcccatcaccacacccagctaatgtttttgtatttttagtaaagagggggtttcaccatgttggcccggctggtctcgaactcctgatggcaaggtgatctgcctgcctcagcctcccaaagtgctgggattacaggcatgagccactgagcccggctgtttttttgtgttttttttgttgttgtttgtttgtttttttttttgagacagagtcttgctctgtcgcccaggctggagtgccagtggcgcgatttcagctcactcaggagtgagccaccacacctggcctgtgattggctctattttgagtgattacgtgtaaatcatctagaaccagctctgagcaatggcgttgcggtgtccctccctccccgctggggccataccagcccctctccactgggagcccaagttgccaatgactgtggccaaactcccccatttttgtctgtatcctgctctctttaggttaaaaagaaggaaagaaacatgaaaggccatgtacaatttatttttacaactccaggagtttccccgactaccattttttttttttttatttgccagtggtgtgcatgtagaagaggaatgccatgtcctgtccatagaaatacacatggtggtcaggcatggtggctcatgcctataatcccagcactttgggaggctgaggtgggaggattgcttgagcccaggagtttgagaccagcctgggcaacatggcaagacctctgactctataaaaaaatttttttttttttttttttttgagagagcgtctcacttctctgtcacccaggctagagtagtgtgatcttggcttattacaacttccgcctcccaggttcaagagattctcctgccttagcctcctaagtagctgggattataggcacatgccaccatgcctggcatatttttgtatttttagtagaaacagtttcaccatgttggccaggctggtcttgaactcctgacctcaagtgataagcctgcctcaacctcccaaagtgctgggactacaggggtaagccaccgcgcctggcccaaaattttgttttttaattagctgggtacaatgataggcacctgtaatctcagctgcttgggaggctgaggtgggagcatcacttgagcccaggagtttgaggctgcagtaagctgtgtttgtgccactgcactctggcctgggccaaagagcaagaccctgtcacacacacacacaaaaaaaagaaatacaggtggtgttttggggaagggaaggttctgctggggtcctggaactgtgactgatggcctcaggagtccaggaataggccttctagcacagcagctagtagggctcccccaagccatccgctggcgtgtggaggtgcaggacctgggggaggcagtccccaacccagctaggccaaggggtagggtttttaggtctgtttttaacagagctcagagcaccaggtgaaggtggaaagttggcaggaaaacaaggtcagcatcttattttttctatactcagcagagtgtgccattcccagtttctgtcctgaggatttcaaagaccacaacagccacatttctttccatcttccctcagccagtagtcatttaaaattcttcagttgttctgaagatcctttttttaatgtatcatttttacatgaaagacagctgcaaaatgcaagccccagtagagttggagagtttttcaaggtgagaagtcgctgttctctgcattgaacatggattgaattttccttgtctgatggtaacccatggcccccgccctgcggggataacattctcaggagcttctcttgtcctagccccttctcatttcaaaaatattagtcttttattttcctttttcattcagtttttgttttacagcttttgtagagaccaacccaagtagatgcaggtgggtgttagataaaaacacacatccccaggggacaagccatccagcggtgaggaatctctgccatgttctcttccctgctgcccacaaacgttacggagactcccttagcctccccctcctcttccccactgaggggcagcttgtggagatggaggactcgggcccatagatgcagaccccctaccaaatctagcaatagttctcacccttccaaagctcgagtgccattttgagatgacctaccaatgacatgcagtaaaggacataacctcacagcctttttagaagcatttcgaatatctacagttgcctcaattcacggggcatttcactcctctgatccaggttagaattttgctaaatctgtagcatcctgaatagcacactaatttttttttttagcacactaactttaactacattagttgagtgtagttgatacatctgtggcctcgtgtctataaagagcacactagattgtacccagcacttttggatatgacatgctaattagatgtatttaactattcataggaaagtgtatgataaatgactgtaatatttctaataaatatattttgtttctaattatttttttctcactgacatttatcaatattttttcaaagtgccacccttaaactgagtctgttttcagaccagcatcttcatgcatatatccttgtcgggtcacagtctccactgcagctgctcttgcgggtggtgctggaattttccacagaggactgggctcctgctggttcctccgctgcccgtgtgcagctttcttgctcaggccacaggcttacgtgaagatcacccttcaaggcctacccaggacactgctgagctgtgcagatgtgcacacgatatgtgcaatgtgtgactaaatgccaactgagaccccagaaaccactcgcagggggaattatgccaagattgaggaggcagggtgaagatactttttttctttttctggtttttttttttttttgagatggagtctagccctgtcgccaggctggagtacagtggcacgatcttgactcactgcaacctccgcctcccgggttcaagcgattcttttgtctcagcctcccgagtagctgggactacaggcacgtgccaccacgcccaactaatttttgtatttttagtagagaacaaggggtcaccatgttagccaggatggtcttgatctcttgacctcatgatctacccgcctctgcctcccaaagtgctgggattacaggtgggagccactgcgcccggccacagatattttgtaaatgattgcttccttaccccttcctagttcatgttttcttaaacatagttacatttcttctttgctatactaaaaatccctaattttagttggtcagagagagggatttgagactgagctcccatctcctcggctgcagcatctgattaaagccttcttcctttgcaatactcatctcagtggttggctttctgtgggtgagcagcgcaggatctaggctgaagccctgaggcttcagtgacaaaatctgtttttcataatgcgatctgtcttaattgtcctcaagaattagtatttgagtgctctctagattcttctttgtcacccttccttccttccttccttcctttcttccttcttttcttctctttccttcgttctctcctgccttctttctttttttgagacggagtcttgctctgtcgcccaggctggagtttggtggcacgatatcagctcactgcaacatccacctcccgggttcaagcgattctcctgtctcagcctctggagtagctgggactacaggcgcgcaccaccacgcccaactaatttttgtatttttagtagagacagggtttcaccatgttggccaggctggcctcaaactcctgacctcaagtgatctgcccgcctcaacctcccaaagtgctgggattacaggtgtgagccaccgcgcccggccgtcacttttcttcaatctcactggtgctcgcgggctgaagggtcaggacggactagaggcgagcaatcccggtggcaccaggcattccccgacctgcccgggtcgccagctgcacggaccctgggcagatgcgcgcagcggctgcggcacagggcggggagcggctgctcggccccatcctaaggcagcagaatgcccagagctggtccctggctccaggcgcaggccgagtagcagctgggcgggcagcggcgtcgggcaggcccttccagccgggctgacaggccgctctgacccagccatcagactccgcttgcgtcctggcagcgcggaccctagggcaacttcgctgcagtggccaagccgggggcggaactggcccatacccctgaaccgagcaagcctaggagcaggtgcgccggcggcgctgtgaagcggcactcatgacaggcaggctgggcgccgccaccccgaaacctccgagggaggaccagccagcccaggttggcgctggagctgcagcgccacctgcaggccaagaagtctttttctgggaggctggagctgcagcgccacctgcaggccaaggagtctttttctgggaggctggagctgcagcgcgacgtgcaggccaaggagtctttttctgggaggctggagctgcagttgcagtgaagtcacaggttccgtgacgtcacaggtgggcaggcgcactagtctgtaacggattggcttggccttacccgcgaggctttgcagtggctgcttggcttggcagtggtcgcttggcttggcgtggcagtgatcgcttggcttggcatttctggcttagcggtcctcctttcgcagattggaaaccgcgggctatcctgctgggaggttgtggccgaggcagtagctcgctactgatggtctcctggggtggagaaaagcggggaggggctgaggggtctccgaagccggcagtctacgccacgaggaaaaccggtagcgtcaggagccaggaggaccagtggtacttgggctacccgggggaccagtggtcctcgggcttctcctacagctggtggaaaaacagcgtcggcagcgagagcaagcacggtgagggcgccttagaccagccccagcacgatgtccgcctggaagatcttggcgagctccacagagctgcccggtcgggcgacgtccctggggtggagcacgtcttggttcctggagacactggcgtggacaagagggataggaagaagaggtaatggccaggcgaaggatgcgggcgcgccgtcctgtcggggacactggctttctggtgcccgcaggccccacggcacccgggatggggaaacgtcagaggggtcaggggcccaggcctcttagtgagacgggatcaaatataaaggattattactattgcaaaagtgttggtctactttacaggagttttctttaaaaatattgcacttcccaactgtgtttatccattttctcaatttattcatcaaacataagggccgggcgcggtggctcacgcctgtaataccagcactttgggaggccgaggcgggcggatcacgaggtcaggagatcgagaccacggtgaaaccccgtctctactaaaaatacaaaaaattagccgggcgcagtggcgggcgcctgtagtcccagctactcgggaggctgaggcaggagaatggcgtgaacccagaaggcggagcttgcagtgagcggagatcgcgccacagcactcccgcctgggcgacagaacgagactccgtctcaaaaaaaaaaaaaaaaaaacataaactgaatacctattatacagcagacatattctactgtcgctcaggttccttccatccttaagaacttcatgttggccgggctcggtggctcatgcctgtaatcccagcactttgggaggccgaggagggcagatcacgaggtcagaagttcgagaccagcctgaccgacatggtgaaaccccgcatgttatgcttttgtctcagcctagacttagctaaaaccttcatgacaaattatcctttaggccctcggggttcagttcaaataatgttgcagaaagagatgagtttccttttctcattgctaccagatctgtatgctgaggacccttttcttagatcgtggaatgtcccatattatcctttcccagatttgtggcaggaagccatcaccagaattctgagtctcaagcatgttagttggatttaacagagctaagtctcatccatgactcatgaatatccatgtataaaatgagagctttggcagggtgcagtggctcatgcctgtaatcccagcaatttgggaggctaaggtgggcggatcacgaggtcaggtgattgagagcatcctggctaacacggtgaaaccccgtcactactaaaaaatacaaaaaaaaatagccgggcgtggtggtgggtgcctgtagtcccagctactcaggaggctaaggcaggagaatggcatgaacccgggaggcggagcttgcagtgagccgagatcgcgccactgcactccagcctgggtgacagagcgagactcagtctaaaacaaacaaacaaacaaaacttgcttcagcagcaaacatatactaaaattggaacaaaatggagagaaattagcatggcccctgcctgcataaggatgatgcacagatttttgaagtggtccatattttgcgcagtcactagaagttcatttgactatttgctgactagttccaaagacagtgtgagtcaaagcaaactgggtatcacctaatattaaaattgtgatttttcactacaaaaatatgcagtaaggtgatcaatggagctgagtaacacgtgggatgttgtgtgcaaatatattgtcagtatgtatctcagaaatgagagaatgtcaacttgcatgtctttcatggaactgaaaaaaaaaagtagaattttgttttccatgtcagttggagatgaacatggggattgagcatccttctaacaaagatctgccgattcagagtttgagtctgtatggaacagtagtccaagctaggtcttgacatctattagctttctccccttggcgtgattgatgagctcagtaatagtggacagtgttgctatctagtttgatgaaataatatatttataagtaaatttagttacaaactatgaactagctgtgatgccccaaattataagccacaaagaatagaactaataaaactagaacttaataacagttttggaaaactgcaacatttgaatattagaacctctggaaaaaatacacattgggttttatttgtgattccaaaaccatttccgcaataaagctcaagaacaaattatttcattgcttcactgtttctctgagcatttacaaaacgttttcttgttaaatctttaacaacctagtgaaataaggcagtaaaatccgtgctttttagaagaatacattgagcctaagagaagcaacttgtcagagaataaatagctgctggtaatagagctaggatgctttccattatgccaagctaatgtgagttaatttactgaactatactcccttcaattcatgagtacttcatctttttttcttcttcagaagcttaaagagaagttggtagaactcacaaattgaagtatatgggataattaaagttctgatattaactctgatattgtttgaaatactctaaaaatttaatatatttggtatttttcatttgttttaaaatagtaatttcatttattacatttttatccatagcattcagcaactagttcctgaatataaggaaaaacagacacctgaaagtcttcctcaaaataacaatccaggtaagacttctgatagtgaattatttttggtggtcctaccataggtaaaaaagaagtaagagtcaggaagttttgatcatgaaagagcagttttaaaaaatctttatttctttgttgataggttagatttcttggtaggttagatgtcacaattatttaaaaagttaattataggtcatttattttttcaaacaatctggtctgaaaaaaaattaattatagtccctaaaatcctatgtgatatttttgtataaataagaaaaagatttttttttttttttgagacagagtctcgctgttgcccaggctggagtgcagtggcacgatctcggctcactgcaggctccaccccctggggttcatgccattctcttgcctcagcctgcagagtagctgggactacaggcgcccgccaccccgcctggctaattttttgtatttttagtagagacggggtttcaccatgttagccaggatggtctcgatctcctgacctcgtgatccatctgcctcgacctcccaaagtgctgggattacaggcgtgagccaccgcgcccggccaagaaaaagatatttttgagttagtaagttgtatgttttctttatagtcacattataatgaattagacttattatgaaattggaacttctatttaatttttaaaataaatgacttatgtttagtaaatgaatatcaatcacaattgacccttaacaatgtggaatttagggatgcttgattccctctgcagtcaaacatctgtgtataacttttgactcccccaagaacgtaactactaatagctaactgttgaccagcagccttattgataacataaatagtcaattaagatatgtttggtatggtatatgtattaatatgctgtattcttacaataaaggaagctaggaaaataaactgttaagaaaatcataaggcagaaaaaatacgcttactgttcattaaatgcaagtggatcattatataactcttcatcatagtcttcaagttgagcaggctaaggagaaggaggaagaggaagattggtcttcgctgtctcaggtggtagaagtgggagaaaatctgctcataagtagacccctgcagttcaaatccgtgttgttcaaaggctaactatattacatagtgatttgtgtcactaaaagaaattagtttcaaaactggaaactcagcaatacctttctggcaccataaacaaatagcaataagaactgtgaaatggccaggtgtgctgcccacacctgtagtcccagcaagttgggaggcctaggtgggaggatcgcttgtgtccagaagttccagaccagcctgggtgacatagtgagaccacatctctacaaaagcaaatacaaaattagctgggtgttttggtgcacacctgtaatcccagctacttgggagactgagatgggaggatcgcttgagcctgggagtcaaggctgtagtgagctgtgatcatgatcacaacctggatgacagagtgagaccctgtctcagaaaaaaacaaaaacaaaaacacaaacaaaaccctgccaaacatacccaatgtgcactaatactaatgggaaattatttttcaaagataccttctgagtgcagaagtcagaaaagcaattccttgttgagaagaacaggtcatgttacatacttataaaccaacaaggtgtcgctattattgactttcccccaatttgaaatcgaatgaggtatatttacttcattagaacaagatgtgtttttctacctgctggttaattgctatgttaacagtaattttgttagaacaagatatgcagttaccattagccaaaagattatcataataaatattcaaatagcccaactctaggctcaacaaattataatgaaagtataaaaatgtttcacaataacaaaaaatgcttctgtgcttccaagatgttatgcctaatgcattggacaatctgaactgtaagaggacacctttaatttagtacatattaatcaaagaacttctctaagttaggttttgcacgttatgggagacaaacatgaaatagacatagttttggtctttgaggtgctcataatagaatagagctttctctatttaatttctgtgtttttttcaacagaattttcaaggaaatcatttattcatttgtccacttcacaaataattatcaaatgtcttttagtactaagcattttttttctaatgttacagaatacagacatttaaaaatactgttggggccagcacagtggtgcatgcctgtaatctcaccactttgggaggctgagatgggaggatcacttgagcccagaagttcgagaccagcccgggcaacatgacaagacctcatctctactaaatttttaaaaaaacaataaaacattagctgggcatggtgccaggtgcctgtacttccagctacttgggaggctgaggtgggaggattgcttgagcctgggtgtttgaggctacagtgagctatgatcatgccactgcactcgtgtctgggtaacagagtgagaccctgtctcaaaaaagaaaaaaaacaaaccaacaaaacccaggagcttgttattatcattgtcactttaattatttgatgaattatttattcagtgcctactactgtgttagatgccctctggaaccgtatagtgatcatttattatgttaaatatgtgccagacactttatgtggtgaggaatgaaagctgtaaaaaagtgagtaagatttaaggtaggcatgaagagtgagtagaacttttctaggtaaagaggcagaaggatgatgtgggcagaagattgtgtgtttcacagaaggagcagcgagtgcaaaagtaagatgcttgagtgaactttgcagggtttatgagcagttcagttttgccagtgcaaaacatatgagatgtgaatggttgggaatgaagtgaatacctaaggcaagctcatgacagacttttttttgagacagagtctcactctgtcacccaggctggagtgcagtggcgttctcttggctcactgcaacctccgcctcctgagttcaagtgattctcgtgcctcagcctcccaggtagctgggattacaggcgccagccaccatgcccagctgatttttgtattttcagtagagacagggtttcggcatgtttgacaggctggtctcaaactcctgacctcaagtgatccacccaccttggcctctcaagtgctgggattacagacgtgagccaccactccctgcccagactttttaatactatagaaatgagtagatctcgggccgggcatggtggcttatgcctataatcccagcattttgggaggccaaggagggcagatcacaaggtcaggagattgagaccatcctggccaacatggtgaaacctgtctctactaaaaatacacatgaaaaattagctggacatggtggagcgtgcctatggtcccagctactcaggaggctgaggcaggagaatcacttgaaccttggaggcagaggctgcagtgagccaagatcgcaccactgcactgcagcctgagtgacagagcaagactctgtctcaaaaaaaaaaaagaaagaaaagaaaaagaaaaaaagaaatgagtagaacttttcctgtaggccatgggaaatttaccaggtggaatgcattgggctgtaaatactaggtgacctaactaacaatggctaaaacagtagggaccagagttattttgatggttcagtgataacacgatgttttgttcatgtctgttttcatggctgactaattagcaacagctccaaacatcatggtctcaccgacaatatctgaaggctgaaagggtggcttttctttacatgtttcttttagttagggagaagactcagaagggtgcagttgacttcctgtaacattttattggctgggtcctaccacatgctcattcctaaaccaggcactggggaagcaaatgtaattactatgatgagcttagaataatcatttcttcttttggagtggggagggctattggcatgataaatatccaaatagattcgtgtttctccagcaagacagaacagggaatcgctattgggtagggagacagcaatgtttactgtaggaacacattggagtggggagtcacatgattagatttgagtattagggcaatctggttatggtataaagcagggattggcaagcattttctgtacagggctttttcatgtggtctgtcattcctactcaaccctaccattgaagtatgaaaacagtcataaaaaggcaagcaaatacacatgactgagctccggtaaaactttatttacaaaactataaggcagactggatttgctccatggcctgtagtttgctgacccctcatatggagagcagctggaagataaccacataaagagacagggaaacaaaagaaacatttgcatttatcagagctatagtttccttgtgctgtcctcagactagtgtcagtctgttgtgaggttttcacccatccatggtgaaatcactaaggttaaggagctcagttattcatttaaaaatgttggtctttttcttggcatgatgcctttttcatttattttacttaaactttttttaatttaagaaataacattaatagttgttttttccctataaaagccactacttaagagcccatgtttaactaggaaatataaacataaaataaacgtgtcacagtggaaatataaagcagatgcagaaaagaggtacagttaatatgatttagtgattgttgaatgtaaaaagataggggatagggagaaatctcagatgattctcaggtttctggcttgtgccctagcatttaacctggacacgagggagtaggcagttttcaggtgtatagaggagagcagcaggtcagcagtcacgactaacagttttctctgcattgctgagtttactgaaatgtccatgtgggatattttcagtaggtaattggataaatttttatggctggagatggagctctgaggttggagttgcagacttggaataactgaggcaaagttgtagatctgagtgagcttgtccatgatgggaaaggtatagaatgagcagagggccagtgacagaaccctgggaatatcagcatttcccagaggaattaggaaagaagcctgagccgtggctaaagaaaaagaggagaggaatcataaagtgatgttgcaaaaatttacaaaggtgagaatttcaaggagggagtatcaattctaaccagtaagattactaaaaagtaaagtgagttaagcttttaaaagccttcagtggcactgtcttctaaagaacaatcatagagttgtggggttcgctgtttatgtgatcagtacttctgatgttcaaatgtggaagaatacacctaccaagatcctacctaacttttgtaactgcagcagctccctgtacaggatcagggaaaatggtcaagactggtgagttaatgtaccaccattttcctagaattgtctaaacctaaggtcatatgtgaggaaaagtgtagtctttcttaactgcttttttgtggaaatgcttgtttggtactcaagtccttgataggctcttctgaatgcattcccaaacaaacatctgacagcaacaacgggaagccaccaccagatacacgtatatatccttcctctgacatggaatcataatacagccatgttgtgacacaatttcaggttttgattagaaatagtttacaggccagcagtttagacaaactgacattttaaaaatattttattgcaggaaactaatataatgtcctggagaaaaaaataaagtgaaatgctgaatataccagttctcagtacttggggttttggtcacatcaggagaaaagtcagtgcctgactccttttgttagtgcagttcccttttcatttaccctcttgtgatatttctgctcttactgcttccttttgaattccattcctaaagaaaatactattagaacacatttcaaatgcacttctttatatctgcaccacaatgacacaatgatgatggtctgccaagattttaagtgtcttctgggttgtcaaatacaaattgttttatctgacatagtttaaatgtgaagtgcttttctggtattacatttcttcagaaattggtaatctgtgatttaactagaatatgtggtcaattggattaccacacttttaaccatctatacataagatgtctcttctcccggccagataagttaaaagtcctgttgatccttactgatcagttccactatttgcagggtttttttggacttttgttgttgttgttgttgagacggagtctcgctcttccacccaggcgggactgcagtggcgctatctcggctcactgcaagctccgcctcccgggttcacgccattctcctgcctcagcctcctgagtagctgggattacaggtgcccgccaccgcgcctggctaaatttttgtatttttagtagggacgaggtttcaccgtgttagccaggatggtctcgatctcctgacctcgtgatccacccgcctcggcctcccagagtgctgggattacaggcgtgagccaccgcgcccggcctggactttttttttgaacgggtgtgattatagcacactgcagctttagttcctagcctcaagcaattgttctgcctcagcctcctgagtaggtggaacaacagatgtgtgctactgcacctggcctgctgcacaattattataaaaatgaattaaatcctacctagtgggagaaaattgactgtgatcttataattttttgttccagaaacttttatactgtagaatatattgtcagtcattaagattttctatttttaattgagttaaaataggattgttgctttttaaaattactttctgacatcattgtttcatgcatttttaatgcctttagtccggtggatatagaagtacaggaatctccaaggcaaatgtcaaaaaaaaaaataagcagattagggaaaggtattctgtgaaattaccttctgattgtagtcacatgaaacacatcaacttaaacaataaaaaattgtataatgtaattgtatcaggggttcccaagacccccttcactgaggtttggtaattcactgagaaggactcacaggactcagcagatagtcatacttggggctttgatttattacatttaatacagcaaaaagacacaaagcaacatttgagaaaggaaaaggtgcatgtgtcaaagtctggaggaagccaggcacaagctacaggagtcatctcctgtgtagctagcaggatatgcttaattcccccagcctcaaattttgacgacacatgtgcaatgttgtctaccttaccagagtttcattagaggctcagcacccatgttttcgatggaggctagtcacataggcaacctctcctctccctcacatgtaacaaaactctagactcccaggaggaaattaactgttcatagtaaaccacatttgcacaaacagtttaggcacagtgagccactcccttcttctaagttagggaatgctgggaaccctcccaaattcaaggtcccaaacaccagccaaggactagccttgcaagcaagcctttctaaggatgggtgtctcatgcctgctatatgaaatctttgctgcccagcagctatgcccctgagtaaatttttggtgttatcttaacattttatataatacaatagcaaataatatgatagaccataacatggtactggtttcagctgcatcattcatattaaatagcaaggctgcttacagttttgacatttggtgaatacttaacaggtattggtacataagttactatggcaatattaagtaattataatctgtccttcttatctgattaacctttcagtaaaattgtgggataaagtaggcataataagttctgatttgaaattagaataaaaattgtctttcattttattttcatggatggaccagttttgattcatattgtactaaatccctgtttacaattatgaaataagatcagatattcaatcatttttgtgaattttttttgcctaagtatacaattaaaattaattgctttatgtgtttttatatgcttcaatttgggagatagtactcgtattctgttaccttgatctttagtgatttgcaattttcaaggtgactctgtctttttataatttagggtaatagcaagttcagtgagtatgtgctttaaaattaataatattattttctgagcagttttagattcacagcaaaattgagaaggtacagagattttccatattccccatgacccctgacatatgaatagcctccctcattatcagtaccccccatcagagttcatcagagttacagttgaggaatctaccttgacagacacatcacccccaaggtccacagtctacgttagggttcactcttggtgttgtacattctatggtgttggacaaatgtgtgatggcatgtatatacccttgtagtatcacagacaaaatagtttcactgccctaaatatcctctgtcctccactgtttcgtctcttcctctccactggtttctggcaaccattggtctttttggtgtctcagtagttttgctttttccagactagtcatatagttggaataaaacagtggtggatatctttttgaatatttaaacaataaagttccatggtaatttgattctgtcattttagatgttctttgtccttgcgtttgttttcctcatgttgtgttcatcagaacaggatctgatggcatatgatttgacgtgctgagaaagcgtgatttctgtagacgtttgccatgtaacggggagggtggggaaaatggcatcatgcagtattccacagcactaactggaccatcatgctctaggagatgggtccagatagactctagcgatgggacgggataatctcaagagctggactttataaaactagaatcacaaagtcttgcatacttaccttgcacttaaaaagatcaggcagtgaacactacaggtgaataaatatgttcctctctggttctcttccttttagggatgagcttgaaaacagtctatattattagaatatggctcatctacaactaaatgctctgtcatggaaatgccagtgtttttctttacaataaatgaaaaataattttgttttcaccagagagagtaacaactgttggcacattctggcaggttgagtgagctgatagttctgttcatatatatttttcataccaggtagtattccctggcaacctgccaccactgtggcagtgtttcttcttaagcttctcactgaatgaatggtgtggctcagagtgaataagctctttaagggagtgatctttccagtggttctgtccataggaggtaaaatgggaggtgaatttgagccttgtttgtactagggaaaatagctagaactcagtaaacattgccagcatctgccccagaagaggattagtgagagtgagtacattgatctcccttgagctcttctccactggcagctgaaaagtctttgcaaagatccttatccctggtctcttccctatgttttgccacataacacagcacagcacccatagacctacataacaaaatgtacagttttccccccttatccatgggggatatgttccaagacccccagtgaatgcctggaactgtggatagtactgaaccctagatatgcaatgtcaggatagaaggaagaggataagagcaaaagggggaataaagaatgtggaaggcagagagtacagagagtaaatgaagggaaaagaagcaagtggatatgatggagggtggtaaaatgagataatacttcaaaagaagagtggggtattagaaaggtggaaagaatataaggtgaacgtgcagcaccaaaacttatcagataagacaaactttacttgccaatatgttagttgtgctttaagtttaattatttcatcatagtgtggctatactgatgattttaagccagtcagatattctggtcagcaaatcatatgtgtgtgtgttttgattatcagaaatgaagaaagcaattaattacccttaataactatatggtggacacagtcttttaaaacattgattctgaaactttttggcctggggttcattttatatgattaaatattattgcctagaggtaaccaacaccctgaattaagaatttattatgtccattcccttttaaaacattttattacatatgtgtatggtcataaataatatgtagaatttgttttcatgtcctaaaattgtatataaattgttttacactctacatattttgcaactttcttttgtctggtcacattacatttttgaggtcagtccttattgacacaggaagctctggttttctatcaaatgactggatctcaaactctcttcataatgataaataaataattaaaataaagaaaaattattgcaaattccaaagagcttttatttaagtcggttgtgtcttttgttatttactattttagaaataaaaactaaaatattttaaaaacaagcatgcagccgggcgtggtggctcacgcctgtagtgccagcactttgggaggccgaggcgggcggatcacgaagtcaggagatcgagacgagaccatcctggctaacacggtgaaaccccgtctctactaaaaatacaaaaaattagccaggcgtggtggagggcgccggtagtcccagctactcgggaggctgaggcagagaatggtgtgaacccgggaggcggagcttgcagtgagccaagattgcgccattgcactccagcctgggtgacagagcgagactccgtctcaaaaaataaaaaaaaaaatttaaatcccaacaattttgtttatatagtaaaaaggaaaatatttttgttatgtattcctttcctgtctcgtggcactgtgtgctatttggacctagtgtggtcctagactaatcctgttctcacatgggaacagttagagcccttaacagctcttattttgcaaataaatgtatgaaatttatccaagtatttgaaaggaaattctgaagatagtggtgcattgaggaaagaccatctcattataattaaaatagttttaaaagtatatttattatgagtttttgtaaatcctgtgtctctacaatacatacatacaatgctgtcatgtatatttaagcttaaaatggttagacataaattctgttttaaaagatttatatccacgaagaatcttaatgggaagcaaaatatgtaatagagactgctgagtgaataaaagtaagtaatagtaaacggtaaaaatgtagaaaagtgagagatgatagttaattaaacttacctgaatgaattgtaagcataggacatgtaaaatgtaataatcctgaatgcatagtgtgttgtgggagagagcaggatgtgggactgtttctgtgaagaaagcatgtatacaagttagtcaaattattgtgttatttacatcctaaaaatgaaaacttcattttcggatttttcagattggcatcctactaatttgacccttagtgatgagacttgtcagagatccaagaatctgaaagttgatgataaatgtccatctgtatcaccatcaatgcctgaaaatcagtcagcaaccaaagaactgggacagatgaacttaacagaacgagaaaagatggacactggggttgtacttctctcagggaatgatactctccatgacctgtgccaatcacagctaccagaaaacaaagagagcaaagaaggtaacaaagaagcatagagaattcagtcctagagtgcctctgcttggctgcatagagctatagttctgacttaaaaaaactttttctggtaaaatgtgctttgtgtttactcaccttttgcactgaacagaataccttttggcaggatatttgtgttcttcctttaaccaaagcaacatctagataacagagaattaggggaaagcaggattttctttaggaagtaggattatatttagaatatagggactaagtatgtttagggactaacataggattatatttaggataacttagtagagacctaaagattgctgactcaaacacaatgtggtttctttgctttatttttacagctctgaattcacagctgttagttataactatatgcactataatttaaaagacaccttcccacacctgcaatctcagcactttaggaggccgaggtgggtggatcacgaggtcagtagttcgagaccagcctggccaatatggtgaaaccccatctctactaaaaatacaaaaaaaactagccaggcatggtggtgaatgcctgtagtcccagctactcaggaggctgaagcaggagaatcgctggaacccagaaggtggaggttgcagtgagccgagattgcgccactgcactccaacccgggcaatagaggaagactccgtctcaaaaaacaaaaacaaaaacaaaaaaacaccttccaaaagcaaatattaagtgacttcctatcgtttctatgactttatgtattatagaattgactttccaagtcagtaattaatgagacttattgagaatttgctgcatagtatctccttggctgtgtccacatgagctaccaccttgcgttaataaatgtgttcgctagggatgttggttttggcattgacagtgttctatcaccaatgcaaataagaccagggaccactcttgagaacattaatgtccaagcatcttaaagttatacgtaaggctttcataatgtgattctgctcagctctccatctttagccctttcccccgtgtgccccttctctggccttactgaactgctggtcctgtcctgctgacccatccttcgactgcaggcaaacacatacactctttcaggcctctttctgccttttgttgctgcctgtcatgctctcactctttcctgtcccctaccccttctaattaggctagcctcactctttaagcctcagctcgggcaggatctctagaaaagtcatctctgacatgctttcttttcactctttaaatcctagtgcctagcacatagcaagactcaatacataattgctgagtaaaatagataatgactctttgtacaaagatgattttcaagattgttccctacagtcaaggagcagagggaatagacatgtaaagcaataattgacaattcgggtggtggagatgcagtagaaaaatcagtaaagttctagggcagccctaaggaaggagatacctagatacctgtttacctggggaaagatgaggatgagggtcaacttcacctagcagtctgttttttattttatgtattttatttatttatttttagcagtctgttttaaaagatgaaaatattaatacatttgtcagaataatacagggaaccatttcggatgttaggaagaggttgtacaccaataaaggtgtccacagtcattttggaaatcattaataaggtactattatgaaatggagaacagtatgcagcattgcctgataatattgctactgcattccaaaattttgttttgtttgtgatggctttgttcattgatgttgggtggatgaatctgtgagtgaatcttcaacatgattgtatttctttaacctggtggcatctagtgtctcccagaaagtggtttgttgaagttttggagaattagaattatttcttaaagaagtaagtattccactaaagatcaagcttcatttaaactctcaatttatgaaataaaatgaaatgtaatttaaaatctatttttataaagactatgtcttttatctaactgttctaagtagtttaactgaacgtttggattttgcagcagaacaagacttggagctgacatcagaggaagagcaagaaagacttaaaggatgcgaaaataagcagccacaagtgtggaaacatttaaactaaaatctaaatttctggtttaatactcttttctttgctttaatatgctagcccaaatgaaattacctctcagactagcctttgagaatcaatagatccttacttaatatttaattttaaatacatttaaactagttataaaacacaatattgttagaatctatcataacttatagttaatctttacccttggagtagaggcaaacattccagaattttgtttgctcttccattcttacaatatccttatgggataaagaaggtaatgtcaattattgacttatattattaagcaacagaaattatgaacaatttaacagtgatggccactaagttggattcatggtataggagtaatcatggccagtggctcaaattttgcagttttatattgccagttactaatgcctaggttaaagatgtggcctttcattgacttcacggtctacattcagtgagagtggggttatgaaatcaacccaactgcctattaagggaatcataccttgcagaatgggatctttggtgttagggtacaaacaataactttctaactttttagatgcagaaacttagtaagaattatctttaaagttttagttagtgttattaggggaccgtagtatatattagaactgaactgaagaagatagtctagatatataaccctatgatgttacagtatataatttgaattaaaacttaagaatttgcttttgtttctgattggtgttgattcgggctcctaataatttgaagattgcctaccctccagttagtaatctatagaacttacatgtagtaatatatagtacttacatgtagtaatatgtagtacttacatgtactgtaggggctcacttttcaagtgaggaagcctttgtaacactagaaatcatctgctaattcatttttggtagatttaacacataatgaattaagtttattccaaacaaacagtgacaaagttaagtttgctggttcatatttttctcctcctttcagctaagacaattttttttaacttcttagttacaagccagtgatttgggagtagccaaacctagatgaagaagtttaacagttaaattttcattttaattatttgtgaatttttctttgtttatacctgttatttaaggacaaagctatttttaaaacatgtagcccaacagagaagacacccaagaaacaaaacaagcaaattaatcttccacttttgcatctgcagaaaacgtctcaagaaccagaaatggctaaggattgtgatagagaggatatacctatatatccagtacttcctcatgtgcaaaaatctgaggaaatgcggattgaacaaggcaaattagagtggaaaaaccaattaaaactcgtcataaatgagttaaagcagaggtttggtgaaatttatgaaaaatacaaaattccggcttgtcctgaggaagagccactacttgataactctacaagaggaacagatgtgaaggatattccctttaatttgacaaataacatacctggttgtgaggaagaagatgcatctgaaatatctgtctcagtggtattcgagacatttcctgaacaaaaagaacccagtctcaaaaatatcatccattcatactaccatccgtactctgggtcccaggaacatgtttgccagtcatcttctaagcttcatttacatgaaaataaattagactgcgacaatgataacaaaccaggcattggacatatttttagtacagataagaactttcataatgatgcaagcactaagaaagcaaggaacccagaagtggttacggttgaaatgaaagaagaccaagagtttgatttgcaaatgacaaaaaatatgaaccaaaatagtgacagtggcagtacaaataactataaaagcctgaaacctaaattagaaaatctgagttctttaccaccagattctgacagaacatcagaagtatatctacatgaagaattacagcaagacatgcaaaagtttaagaatgaggtcaacacattagaagaagagttcctggctttgaagaaagaaaatgttcaacttcataaagaggtagggttttacttgctgccactctttgttttttctctcaattatctggtccattctgattttccacttaggaaaagcatatgaaaatcatacagtttggttgtctaaatctgtaattgtgtgtagaaacagatgatttctaagtaataggagtttaggaaaactttctcataatctttgtttcttaattgacctaagtctctctgtcagtcttccaagtggcgtatggattgtgaaactcatgtagccatatatcatgtgaccttcagaaccaggagaggcgtcaagaaaattgctaaaggaaatgtgatgagcttgagggctttttccttttaccgacttaaagatgagttgtgtctaacaataagatgggaatacagtagaaaggaagcaatgactaagaagagatataaaaatgtatctagcaggcgtggtggcaaacacctgtagtctcagctactagggagcctaaggcaggaggatcatttgaggccaggcattctgggccgtagtgtgctatgccgatcaggtgttcacactaagttcggcatcaatatggtgacctcctgggagcggggcaccaccagatttgctaaagaagggtgaaccagcccaggtcggaaatggagcaggtcataagtaactcctgtgctgatcagtagtgggatcgtgcctgtgaatagctactgcattccagcctgggcaacatagtgagacctcatctcttactaaaaaaagaaaagaaaagaaaaagaaagtatccagccctgagagctgcagcaaatattcctggccaatgaatctgtttattgtgcttttcaggtttatctgtttaactcaaactgttggaacttagaattgcatcatgaccactttaaatatttttcaacaacaagtatatacactttaatatatttgttaatataactactctccactgtttctgttgaatcagacctttatgttatgttgcttaataaagtacagtaagttttggcacatatattttttccatgtaagtagcataaatgctcagccaaacacttagtatatgatgccaaagtagaaagctgagtcttctacattgattagggcaggcctcccaccctcctctaaggcattaaattattttacccaagtcacacttttaacctatctgattactttgctgaatttgtctgattcagcattatggaattgtactgtctcttttggtgccacaaaatgctaggtaatggcacttcaggggctttggatcaatcattttaatcttttttggctttagcccagttatcaatagagagtgagctaaagtagattcttatactgtatatcctccagctataaacttttatggctattgaatgtgaaatttggggagcatctcatttcgagaattccaccctagctcagcagtttcactctgctttttgtgttgtgccagacttgtatttcagtaagcaccttcaccttttcgatatcccaggattcaaatgaaaaaaaaaaaaaaaaaaaagacaaaagttagtgggggaaaagaatagcttagtgcagaaaagggaaagcttcctttcttttcctaaaaccccacagtgttgtatcctctcaatctggctgttgaatatgaaagtcaagtggcaaagacagaagaagacatgctttgtgtctttatcttcttatttccatgtttgtgccagtcaaatgaggtaaaaattcataatacatagtgaagggtggttgggaataaaagcacaaaattaagacgggccctggttgaaattttgggaaattctgtctcattcattgaaacagaaatgaagctgactttacaaaaatgttgatgataaaattataataattataattatatgatgatagttccagatgtgataaaattaaagtaagcaccaaatattttaatgactaaaattataattaaactgagtcaagtgatgatgaaatcaatgaaaacagaaaaaagttctttgtattgaataaagcaataacaatcatcctgaacatcaaactctcactcaaggttgaagaagaaatggagaagcacagaagtaatagcacagaattatcaggaaccctaactgatggtactactgttggcaatgatgatgatggactaaatcagcagattcctaggaaggaaaatggagagcatgacaggtaagcctatagcagcgtttaacaggagacaattggtcaagtgtggtggctcacgcctgtaatccagcaatttgggaggccaaggtgggtgaatcacctgaggtcaggagttcaagaccagcctgaccaacatggataaaccccatctctactaaaaatacaaaattagccaggtgtagtggtgcatgcctgtaatcccagttactcaggaggctgaggcaagagaatcgtttgaacctgggaggcgggggttgtggtgagccatgatcatgccattgcactcgagcctgggcaacaagagtaaaactccatttcaaaaaaaaaaaaaaaagcaaaaacagaaacaaaaacaaaaaacaggagacaattatgtgctatgaaatgaatcctaatttgggctaatattcatgatgaacagattttatacttttactaggatattcagccttccttggttatcagaaaaatgcaaactaacaatgagacaccatgttttccaatcatattgatattttatttaaaaaataggaagtattggcaaatgtgaagaaaaaggcgttttcatacacttgttaaatgaaattgatgaatcctttttgcagggtaatttagtagcatgtatcaaaatttcaaatatgtcacttctttaacctaacaacttcacttttgggacaagatcctacaggaaaatatgacttgtgtaaacacatacacatatgtgttaaggacatttattacatgtatgtaacatacaataggctaataggttaaatatatataatgttaagtatatatgatatatatgttaaggataattatatatgttacatatatacttatgtataaggatatttattatagcattgtaatatcaagaagttggagatagtctaaatccttagcaataaggaaatagtacaattgtcatacccagaaaataatgtagcatgcactcattttaataaaagaagttgttagaccaggagtgtactgattatttcacaattaaagtctatttaaagcctttagtttgatgacacatcttaagccagttttgttggaattctcataatatctgctgagttacaaaaggaagctagctacatgctacattgacactgtaccttgttagcaacagaattctagttattaaatttttgttttttgctgtcaatgtgtgagtgctgaaataccagatcctcaaattaatctgaatattgccaagggattgcacatggggattcatgttccgtgtcagcttttcaatatactgggtaaaacttactaaaatacaacagaggatcttagctctactgaaccaagaattggacagctctttttgtaaagagccagttagtaaatattttaggccttgtgaattataaagggcataagtgtggctgcatttcaaggaaatttccttatgaaaacaggcagtgggctggatttgctccacaagcaccaatttgttgatccttgtgctaaaaccaaggtgctgttatgcagtgaatcctctttttaaaggtaccctacatgcatgccattatcctttcttttaaaagataatgtatttcagtaggaaacacaccatatttttcaacagtagcttcatataatttagacaaatttgatttacaaaataagatgattttctgcacttgtccccttttattcttgttatagaattccatattttgactattactttgtatatttgatgagtataaaatattctagagttagatgatttttatcaagcaagaaatacttctcctgaaactgttagtcttccttggtctttatgtataagcatgagcaaaatgataatcagcttatataatctagaaatgttcaagaggtcttttggtcttataagttaatgaatttttatttaataccttcatctggcatttcaaaaatgccatatagatatgatttaaaaaaaacttttaaagggtaaaaatatagcatatagttatataagaattgaaaaatacagctaaacaagaagaaaattagatcatctacagtcatgcccctaggtatgctggccttgaaagaatggtttatactcatggattcagatttcttgtccattcactcttgagctgataccagtaattttcactcccaccactcttccaagattgttgttctcaagtttaccattgatttgtaaatctagacattgtttcttagacctcattttatttaacctgtcagcaatattggacccaatggaaaactctctcctccataacagtgtcttcacttggctttcaggatctcactcactcacctggcttttcttcctgcctttccagtccatctgtcatagtctgttttgctttcttctcatatcccaccttttacacattgatatgtcccaggactgatatgtcccaggactcagtcctcaatcttctttctcatgacttttactaccttgtgtgtgctaatgatttccaaatgcgtgtctccagcctagatctctctccttaattccagacttctataccaacctgcctacttgacatctctgtttgattggtcacgaactgttgggtatcacaaacttaccaggtccaagattggggtaccgatattctttctcatacctacccctcacatggtctttcctacttgcattaatggcaactcttgcagttgctctgctagaaactaaggtgtcatcattgactcccctctctctctgacacctcacatctaatctgtcagcagatcttgtcaggagtacctgaagaatatatccagaagccagtcatatcttccatttccaacccaccaccatctgctctctagatgcatgtaatagactgttaattggtctgttgttttttttttaaagaaacctcttttcattaatccttaactcagtggccatacttaaaacataagtcagatgatgtcattcttctgctcagatccatctgattgcctcccatttcactctgagtatgtgtcagggttcctcctcatacctagaaggcaacacacaatatgccctgttctctctctcacttaaacttctgtttcttattccctttgctgtgcttcagctacactaaacttcttgctcttcgttatctatcacagttgcttaaacaccccaggcacacctctgtactgggcagttccctgtgtttgggatgccttttcctcagatagcctcctggctttctttttccattccttcagttctttacttcaaagcccctttctcaataaggacttttctggccatcctagaattcccactatccctcctctcaaacctgtaaacatttcattttcctgctttagtttttctcctttaacactgtatattttgcctaatctatctatggttattgtgtttatttcactcccatgagtaggatgtttgtgtgcctagaaaagggcctagcttgcaataagtagctactcaataaatatttattaaatgagcaactgaagtttacccttcggtgtattgttttaaacattagattgattctcaggtaagaaaaaaaaaaaaagaaaaagaaaggtttcacatgggttcattctaacacttttgcctggaaattatatgcgtttttggattttttggctctttgtaataagctacattctttgtattaatagttttccatttagagagaaaagctcaatattgtggttactcactatttattcttttactaataatcatgatagttttacttatgataaaatggatcaaaggaattacatagttcattggtaatttataaagaaaattaaaatataagggtggtaaatttaatggacttaaaattgtttccaattgattatgaaccttcagtatttgaagttaaaagaccaagttggaatgtgttgctttctataagagagctatgctcatcaggcactctgtattctgacagagcagctgttgatcttacatagggttgcaggaggagcggacttgaagcattggcagactctcagcggcataggagggttaacatcatctggagaaacatggctatctgagtgaggctgctgtgggttggttaacactcccaggcttgtggattggagtgagtttgtgtttaattggctgtctttccgaagcaagtggtccacattgatattggttggtgagagaggccaatggtcactgatgattgactgtatttacaactggctgtgggtggttgcttgttacaaatatagctactaagtttgagacaactttaaactgcagttttctgtttaaaagttgccttccatcaactatgtttaaaatgaaaatgatttcatattccagaactatagacttaatttggaagtgtgggtcaagaggaattgtttaataattgctctcaggaagatctctttttttgatgcttagtcttaaccagaagaattcgctacatagttaaaaaacaagcaaacaaacaaacaaaaagcaattattaattttgtttcagtttttagtattttcagagacttctgctaaactcctaatctccagtgggaaatgtttgtctctttgttaatgtatgtagttatatgatagtgatattcttttttttattccttaatctttttttgttcaccttctcttccatgcaatgatagtgatataatgtgtgtttacttcataaaaaagtaattacaattttctgctggcaaatccacctttttatattaagactaagtactagactaaatatgtgggaaatttaccaaattattttattttcaaacaaacatataactaatcagaatattgctatttttgaacaatatataatgactataatgacatttaggaattttaacactaagatttttttcttcccgagacatttccttgatttctttcatgtaatatgtgcctgttatttttaaaacttggttaatctgtttaaacattattatatttaaaaacaaaacccaaaacatagcacagatctaaatatgagtttcatgtgtgagagtcattgcctgtgtgcagtggactccagctgtttttttttttttttttttttttttgagacgcagtctcgctctgtcgcccaggctggagtgcagtggcaccatctcagctcactgcaagctccgcctcctgggttcccgccattctcctgcctcagcctcccgagtagctgggactacaggcacccgccaccgcacccagctaattttttgtatttttagtagagacggggtttcaccgtggtctcgatctcctgacctcatgatccgcccgcctcggcctcccaaagtgctgggattacaggcgtgagccactgcgcccggccagctgtttttttttttcttttcttttttcgttgtgacagagtctcactctgtcaccaggctggagtgcagtggcaatctcagctcactgcaacctccagctcctggcttcaagcgattcttctgcctcagcctcccgaatagctgggactacaggtgcgccaccatgcccagctaatttttgtatttttagtagagatgggcttcaccatgttggccaggatggtcttgatccattgacctcatgatccgcccgcctcagcctcccaaagtgctgggattacaggtgtgagccaccgcacccagctgactccagctttttagtgtggcattcatcttccattcttactttctttgtgttttacacttttcctttcaagttcctaggaaacacctagactccatgggactaatctttgtgctgtcattccattctccaagtggagtagttttctctattttttccctggtgagctcctcttatattttgcctcttctgtaatgacttccttgtgctaaaatataactttccatatatcaactcttaaactacacattgtatcataattgcatattacctggtttttgaggcaggaaatatatatttctttatatgttgttgataattcataactgtgttttttgaattaatgaattgagatggggaagaattggaattttacaaaattttttttatttgttatcagtagaattattataaaacattggctttttgtagattttttaaagttgtggttctgcgttacatatgaaggaagtaaagaaaaatgaaaataaaaaatgtacctcaaaataatctctaaaataatctctgattacaccagtgtttgagaaggctaatttagtaacttgtggtctgctacaaggagatgatgacagcagtttaagtgaaatagatgaggttgaaagaagttaaaatgtataagttctttatttctctgagaaggaatattcccagtggttactttttctggaaatagaaaatagtgtagtctgccaaagctagagaatactcaactatatcaatgctgaaagactgattatgatgagggctggtaactttgacaaggagcagtttcaataaataattgctgtggaatcctgactgtagtggataagcatagataccccttgagggaaccgttattgggaaaggcaacagagaaatgagtgataactgaagaagaatgtgggattcaagggaattttctttcttttttatttcaaaatagaagcttttagagtgtgtttgtatgctgctgggaatgatagggacaaggataacatgtttatgagatttaattttgtatgtctaagtgtttgaaagctcggttcattatcttttgtaggtttttagcaaactaattgtccttaaagtgtttattcatgtagagttttatggtaagagtttgttccttcagcattggttcagaaatgtaacatattagcataactgaacctgtgaatggtgacctaaaatttaaactatcatatgcagattgtttttaattatgaaataataaacatgcaaacacttaggccatactgaatagaatttaaacatccctgatgaataggtatgatctgctgaggtactctaaaatgtcaggagtatcaactttacagttgtttagattctggggagaaggggagggttttgtttaagtactttagaaaagctaactgttgacagtctatcagattattacttctggattataaagttttgttttttttgttttttttgtttttttttttttgagacagagtcttgctctttcacccaggctagagtgcagtggcacaatcttagctcactgcaatctccacttcccagattcaagcgattctcctgtctcagcctcctgagtagctgggattgcaggcgcccgccaccgtgcccagctaatttttgtatttgtagtagagacggggtttcatcatcttgggaaagctggtcttgaactcctgacctcgtgatccatccaccttggcctcccaaagtgctgagattacaggcgtgagccactgcacctggcctataaagttttttttaaaaatatttaatcaagttgacctacaatggattataaagttctgaagtatcaaaaccatgtttcccttgaccaacattgccatcagcatgtattgtgtgctcaatgagtatttatttgttgaatgcgtgaatgaatgggtgaatacatgaatgaatacctgttgatggatttcattaaaaatactttttagttttttgaaagtagttttctaaacttgcctctgtataaagtttttttattagaaaaaattgcaagattctgacattatttatagttgtagtcagaaatggaatgacaatgtgggttcatctgctatcatctctctttaaaacacttgaaaataaatgttaccttcacagcatatcatgaagcacatgtttttgaggcagaattcttgggtttgagttctggatctgctactgaccagctgtatgggctgaggacagtcacttggcccttctgtgcctattttctttctttataaaattcttaatatgttactgacctcacagaattgttatgaggattatatgagtttgacacatggacagtgctcagaatgatgcacagtacctgcatagtaagtccagaaaaagcttactaatatcatcattaaaaaagggtttcccttatataagaatgtgagtaatattttccaaataggttttagtgcccgtaaaagcttgtttttattgaaaaggacaacaatgagaagaccctggtatatttatttttatcacgtaatgcaggtaacatatttttttcttttggttttactatgagaaatcttgacctaaatttaattctttgtaattatattagtagtagtaaatttctttatcccttaatgttgctgtttctgtttatagtttaatgtccgttgtagaaaattactgcattttacattacctgtaaaaaaattacctatacacttgatgaatagaagtaacacaaatgcagacattttatatgataaaacagtagtgttagatattctttgtattttaaatctttgctatttttctaagaggaattgtttttttttttttcaggcctgcagataaaacatctaatgaaaagaacgaggtattgtaaaaaaggaaatgatctaaaatattgttttaaaaaaacaagttctaaaaggtaaaaatgaaaaaaacaagatgttttgttgtaaggctgtttgcttagaaaaagtgatgaagaaacagtaaccgttgataatggtaccttttaagaacaatctgttgctttaagaagtacctgtatttttgctcatacaaaaaaaatggagaaataccgcttctgtacctttagtatatgctataaatctttcgaggacattttgaaacagtattatttatcttataggtcaaaaaccaaatatatcctgaggctgactttgctgactcaatggagccatctgaaatagcctcggaggattgtgaattgtctcactctgtttatgagaattttatgttgctgattgaacaacttagaatggagtataaaggtaggaccactgcataaatgcaaggccttttgatgtatcctgcagtaatgtgtgtatacattgctgagaactgatgtgtgatagtgaagctcatctcagaaatacgctcagtgttaaaatagagaactagcttatactctacgccaaagagctatgataactccactgtacttctctcagtgtgagtggcattcccagtctttttgttgactctttctctcctattccttcccccaatgtcaggttaccatttttttctccacctggaatgctgcgagaatcttaggaatcttagaactgttttcccaaataccccacctcctaaaaccatggtctactctgcaatcataatgacaaatttttaaaaatttggatctgatcatgttactcctttgcttataactcagctactacttcttattgctgtaaggttagagatctgaatcctctagctttatcctgcatcgtttttactcttctctttctctgtgtcccactctgtgtcttatatgtttgttccagcactgatagcttcagtgaggtataactgatatatgatagactgcacgtatataaaatatacaatcgtgtgcacatttgaaaccaccataatcaggagagttaacatgttcatcatccataaaagtctcttcttgtccctttgtctttctttattaagaaactgctaaattgttttccaaagtatttgtattgattttgcattccaaccagaggtatacgacatttcttgttgttctgtatcatcacaagctcttattattgctgtttttaaattttgaaattttagccattctgatgggtgtgtattatgcatatcattatggttttaatgtgcattaccctaaggactaataatgttgagcatcttgtatatgcttatttgccacctgtgaactgtcttttccaatctgggtagcttatgaacatttaaaattgagattcgattcaatcagcttttttacatacaccaaagatagtcaaaccttttcattttcaaactgttatcttactaaacatagtaaatattttaaacttgtgatgaaatggtctctgtcacagccaatcaactctgccattgtagtatgagaccagccatagacaatacatatgttaaaaaacacaactgcattccattaaaactttatttgcaaaaataagaagctgccccgcaggttggattttacccatccctattatgtgatcatgattgtgaatacagacagttttacttcttcttttcaactcaggtagcttttatttccttttctttcctaactgcactggcttcagtgcaatgctgactagaatagtgaaaggagacattcctgtattgttcccgatcttacagggaaagcattcagttattcatcatgacacatgttagttgtaggtttatcagagatgctctttatcatgctgatggcgttcccttgtattctttagttactgagaggggttttttttttttaaatcaggaatgaatgttgtattttatcaaatgcctctatctactgagatgatcatatggttcttctcttttagttttttaatgtggtgaatacttatattttaatgtcaaacaaaccgtgtatttagggatacaccccacttgtttatgatgtattatccttctaatgtatcattggatttgatttgccaaagctttatttagagcgttttaaaagactattttttagagtagttttagcttcacagcaaaattgaaagtaaggcacagagattatccctgtactccctgcccccacacgtgcatagcctccacaattatcaatatcctcaccagagtgctacacttgatctcattgatgttcctgaattgataatcataatcacccaaagtccatagtttatattagggttcattctcggtgtcttatattctgtgaatttggacaaaagtataaggacatgtatttatcattgtagtattatccaaagtaatttcagagctttaaaactcctttgtgcttcatctgttcatcttttcccaccttccctccccaactcttggcaaccactgactttttttactgtgtctgtagttttgccttttccaaaatgtcatttagttggtatcagacagcgtgtagcctttagactggcatctttcacttggtaatatgcctttgtggttccttcatgtcttctcatggcatgatagctcattatcgcatggctgtaccagaagttgttcactcacctaaaggaggatatcttggttttttgagaaactggttacatttttacgtccatgttcatgagggagtcagattttggttcagggtaatgctagagggacagaatgagttgtatttctcctctattttttttttgagggcagggggagaggtcatgtaaaattgttatattgcttcttaaatatttggtagaattcaccagcatagctatctgggcctggagttttctttctaggaaggctttacttatgctttcttttatagatataggacagttcatgttattccttcttaaattggaccttggtaatttttgtttttcaaggcaagtgtccattttatcaaagttgtcatgtttagtcacataaagcttaccttattatatttgtattcttttagtatctgtagaatctataaaaatgtcatgttactatgtttctgaagttagtaatttgcatcttcttttttatgatcaacctggctagagttttatcacttttattgacctcctcaaagtgtgtggttttattgatttttttcctattgtttttccgttttattggtttcatctttgatgttttggtctgttcggcctgctataacaaaataccatagactgggtagcttataaacaacagaaatagatttctcacaaaagtccaagatctaggtgctggcagatttggtgtctggtgagagaccaattcctggttcatagatctcttttttccccctgtgtcctcacatggcagaacaggtgaatgagccctctggggtctatatatataagggcactaatcccactaatgagggcttggctcccatgagctaattacctccacaaagccccaccttctgataacatcacctctgtgattaagtttcagcatatgagttctgggaggatgcaaatgtcagacaataccagatgcttattgtatcatttcctctgcttgctttgagtttaatttgttcttcttcttttttagtttcttctctttttttagtttcttaagataaaagtcaagaccattgacttgagagtcttctaatatagacattaagtgctaaaaaattttaagtactgttgtagctgtgttccacaaatcctgatatgtagtattttcattttcattcagttcaaaatactctctaatttctctttgcatcgtgtctttgacctagggttatttagatgtgtattactttgttttaaaatatttgaatattttgatgagatattttgttactaatttgtgatttgattgccatgtggtcagggaacatactttgtatgacttaaatctttctgacttaattctttcattaagattgattgcaggccgggtgcagtggctcacgcctgtaatcccagcactttgggaggctgaggcggatggatcacgaggtcaggagatcgagaccatcctgaccaatacggtgaaactctgtctctactaaaaatacaaaaaattagccgggcgtggtggcaggctgaggcaggagaatggcatgaacccgggaggcggagcttgcagtgagccgagatcccgccactgcactccagcctaggcgacagagcgagactccgtctcaaaaaaaaaaaaaaaaagattgattgcagaacctagaatgtggtctgtttggtaagtgctcactgggtacttgagaagcatggtgttgttcaagtgtgctccattcttgctgatttgcagctcccttgttttatcacttattgagtaagtgatattcaaatctcagatgtacttgtgaatttgtctatttcgtctattgatttttgcctcatatattttgaagctgttattaggtgcacaaacatttgagattacacgttcttgattaactgaattttttttttttttttttgtatttttagtagagacgggatttcaccatgttagccaggatggtctcgatttcctgacctcgtgatccacctgcctcggcctcccaaagtgctaggattacaggcatgagccaccgcgcccagccgattaactgaacttttaaaagtcattaggaaatgactgtttatagctggtaatttttttttttttttttggtgtgaaatctactttggtattaacatagccatttcttctcaggcttcttttgtcaactcttagcctgatatatctttttccattcttttgaacaatttatgtttttacatttaaagtgctttttttaataggaagcatggagtaggttcttgcctttttatccagtctgacaatctgccttttaattgagatttttaggccagttccatttataatgtgcttattgatacagtgaaatttgtctgtcatcaagctgtttgatttccattggtccccccagttctttgttctcttctttttctgctttcttctcaattagtccagtaatttttatgatttatttttatctcccttttatggcttattagcgataactatttttttctatcttagcagttgcactacaatttatagtatatgattttaacatcacagtccatcttcaaaaaatattatggcatatcatatatggcataagaaaattatgaatgaaaacccaaacattgtatgttctcacttgtaagtgggagctatgctatgaggatgcaggggcataaaaatgatacaggttggggacttgtggggaaagagtgggaggggggtgagggacaaaagactacggattggatccagtgtatgctgcttgggtgatgggtgcgccaaaatctcagaaaccaccactaaagaacttattcatgtaaccaaggaccacctgttaccccaaaagctattgaaattttttaaaaaagaaaattggaatagtatactttcatttcctctctcccagccagatacttctggatttgtaggattatagttttctttacatttagaaagttttggccattctttttttatttttctgtctctctttttccctctttggggacttattcctgcttgaagttttctcatagttcactgatgtctcaaatttatgaatcttctctttggtgatgtctaatctgtgttcacctccatccattttagctttcattcctgacattgtaatttgaatctctacaagtgtagtttgctttaaagaaaaatcttccatgcctctgcctgtctgcttgagcttaattttaatatacagttgagttccatatgaacagcttgatctttctgatcttgcttttatgattggtctaatttcctgctcctgaggcaagatctttgtgatgactctattcattgccatgcgaagtctgagttttcccagcatcactcatgggaatggacactctttttggcacatcgtgaacaccagacatgtttctttccagtgttttttagatgtttttttccccttgatctggggcggttttctggcacacatgtgctgtttgttactctgctagatacccaggaggtatttttgcaaatcttcagtgttctttccctgtactttgtctcctttccggtgttctgttttgtgatctctgtgtgccttggctttaccagactctcagcttcatcatctcatctcagggaatctggtggactctatgtcagttttttctctctgtgcggtagcctggaaactccgtgaaggcagggagctggagtgttggatgaatttcctttgtttcctgtcttacggggatcattgtcttcattacctgaagtccactgcctggtaaatcattgtataatatattttgtctgttttctttttggttgtttcaggccagaaggtaaatcagtacttgctgtccattgtggccagaagcagattccagcagagcttcagcacctgctgtcgactggcaagaatgcttttctacccctttgcttaactgcttccttctcacccttcatttctcagtgtagccatctgttcctcaggggaatcttccctgggcccattatagatcaaattcttctgtgtgatcatagaactctgttttcttacaccatatatctgaatttataattgtcatttttgttgtgtttgttccttacttcacttaaggctaaatgagagtagaggtcttatctgttttatctgcagagcttagtagaatgtctcccactttgtaggcactcagtgcatatgtgttcaatgtatgaaggagacaatgttaaaaatgcacagttttttaatacctaaaagtactcatatattttatttctaccttttctccctgacacagattctgctagcctaccaagaatccaagaaagacacattttgtttgtgtgaacacttactgaaacttaagaataatcactgtgaccaacttacagtaaaacttaaacaaatggaaaatatggtcagtgtactacaaaatgagctatctgaaacaaaaaagacaaaattacagttagaacttcaaaaaattgaatgggagaaagagctgtacgatttgaggtatgatgttctagttctaaagaaatatttatactaaagacaatatatcagaatttttgtaactgctgacttaccttctgcagattaatgggggagaaacctttttggtcttgtgggatatgaaattcttggaaataataaaacaaattattaactgtgaactcttctaataaataaatgtatattctttgcaatctaaatggccatatagaagtccaccatataaaatcttgttactcatttaacaaattgtaatttgggttttaaaattatcttgtatttataattaatgatgtaaggaacatcttttatcgttactattatttgtagacacagggtctctgtgcctggaactggagttcactggtgtgatcatacctccctgcagccttgaactccatcctcctgcctcagcgtcctaagtagttgggactccaggtgcacattctcatgcttggctaactttttaagtgttttgtagagacggggtatcactatgttgctcaggatgatctccaattcccaacctcaagcattacttctgcaaaattggcctcccaaatcattagtatgacagacatgagccatcatgcccagcccagaacattttttatataaatgtttttctacattcctaaactgtttgctttgaataaattctccaatatagaattattggttgaaatataggaactttttaaaaagacctctgatcaacatttcttaatttttcacaagaatgtttgtgttaatttatagttcaagcaacagagcatgaactggtcacttttctaaacccaaagtaattttcaaaaaatttatacagttttattctttttgaaaacttttttttaatttcatagctttaggtatacaagtggtttttggttaaatggatgaattgtatggtggtgaagtctgggattttagtgtgcctatcacccgagtagtacacattgtacctcagtaggtagtttctcatccctcatcctcctcccacactctcccacttctgattctccgatgtccattatactactctgtctgcatttgtgcacccatagcttaactccctattatgagtgagaatgtggttttatttggctttccattcctgagttagttcacttagaataatggcctccagtcccttccaagttgctgcaaaagacattatttcattcttcttatggctgagtagtactccatgacatatatataccacatattatttattccattcattggttgatggacacttaggttgattccgtatcttcgcagttgtgaaatgtgctgcaatagacatacgtttgcaggtgttttttttttgatataatgatttcttttcctttgggtagatacccagtaggggattgttggattgaatggtagctctattttagttgtttgagaaatctgtctactgtttttcatagaggttgtactaatttacatttccaccagcagtgtataagcatttccttttcaccacatctgcaccaacatctattgttttttgactttttaataatgagcattctggctggagtaaggtgatatctccttgttgttttagtttgtatttctgtgaatattagtgctgttgagcatttttaaatatgttttttggccatttgtgcatcttcttttgaaaaatgttcatgtcatttgtgtactttttgatgggattatttgcattttcttgctgatttgtttgtcctttgtcagatgcatagtttgcaaatattttctcctatgctgtaggttctcttactctgatgattatttcttttgctgtgcagaagccttttcttttcttttcttttcttttcttttttttttttgaggcagagtttcactcttgttgcccaggctggagtataatggcgtgatctcggctcatggctacctctgcctcccgggttcaagctattctcctgcctcagcctcctgagtagctgtgattaaaggcattgccaccatacctggctaattttgtatttttagtaagacaaggtttctccctgttggtcaggctggtcttgaactcctgacctcaggtgattctcccaccttggcctccatgtcactgcactccagcctgggtgacagagcaagactctgtctcaaaaaaaaaaaaaaaaaaaaaaatatatatatatatatatatatatatgtttttggttaaatggatgaagtgtatggtggtgaactctgggattttagtgtgcccatcacctgagtagtacacattgtacctcagtaggtagtttcatatatatatacacacacattttttttttttggtagacatgaggtctcattatgttgcccaggctagtctcaaacttctgggctcaagtcattctcctgccttggcctcccaaagtaccaggattacagatgtgagccacatgttaggcctaatccatcttgagttaatttttatatatgttgagagatagggatccagtttcattcttctacatgtggctattcaattttcccaacaccatttattgaatagggtgttctttgcccagtttatgtctttgtacgctttgtgaaaggtcagttggttatacatatttggctttatttctaggttctctattctgttccattggtctacgtatgtacttttttatacaagtaccatgctgttttggttactttagccttgtcatatggttttagatctggtaatgtgatgtctctggcttcgttctttttgcttgggattgctttggctattcaggctcgtttttgattccctgtgaattttaggggtactttctctaattctgtgaagaatgacagtggtatgttaataggaattgcatggaatctgtagattgctttggttaatatgatcattttcactatattgattcttctaatctatgaacatagggcatatttccatttgtttgtgtcatctatgatttccttcagcagtgctttctaattctccttttagagatctttcacctccttggttaagtatattcctaggtttttgttgttgttgttgttgttgcagctgttgtaaaagggattaggttcttgattagattctcaccttggtcgttcttgatgtttactagtgctcctgatttgtgtacattgattttgtaacatgagacttttactgatttcattgattaaatctaggagtctttagggttttctaagctaaaacagagatagtttgactttgtcttttccaatttggatgccctttatttatttctcttacctgattgctctggctaggacttcccagttttattctaaatatgcacgaaataagtaaaatggacagtaattgatgattattttattccatatctctcatatgcagataaaattaattccaaattcattgttgaaacacatattatcctttacttttaaactaaatattagatcctgtcttgttccaaaaagggattttaaaattggtgatgaaatacttaagaatcaagaagataagttgaaagtgttacccaaaagagaaacataaaaaggatggggtaacagttatagacagcttaggctagtcttggattatagtaatctgcagatacatgttgtgtgaatgacatctgaaggtgttatcttacactgtaaatcatttttatgactacacatacactattccatgaagacgaaaatgcatttctagtgaatttctaaacttgtttgtaaacagtaacttcttttaaattaactctaaatgatctaattaattttcaacttgcataacgtgaaaaagaagtaattttcaacttgtaactttactgaaaaatttcaaatatgcttttccataatatttaccagggttactagtaacagaaacttaccagttaatggaatatttctttcctcactacctctcaaatatatatgtcccttggaagagatcgaagtgagaaattaaaaacatgagaactagaaaggaaacaagagcataggagtttttatgaggataataaacccacatgggaagagccagatcacagaataaacttttttattttttaacaaaacacattttaatgtaatccatgtttaactgcagacttgccttaaaacaagaaaatgaggagaaaagaaatgccgatatgttgtataataaagatagtgaacagttaagaataaaagaagaggagtgtgggaaagtggttgaaacaaagcaacaacttaaatggaatctgagaagacttgttaaggaattgaggacagtaagaaataacttggatctggtaaattaatctttggtgtaaacttcatttttctaactttatgtttcatcggtattacttataattttttgccttcatgtatatcatttaggtttaaaataaaccaaaactgttatttcctcttaagaatgaactatgacatttatagataaaattatttactgtaaaccttgtcatctaatagatgctcagtctgtgtttttagagtggaggataagttgagtttaattactaatatagctgttcatttacacattttttatgttaaaatacaggctaaatagctttgaaactataaggacactagttaaatgttttgaaagaaattttatttcacaatgctgtatcttctcgtagttaagaactgtttttcctctttgacagatttagctgtcatgtatgcaattaagatttgagtgattcttgagggataaaagttcttgtgttttaacaggctacttctttttaaccgttttataagagaggctctgctcttaaccttttagattttctttttcagtgctattagaccaaaacctccatgtcatctctaggttgtgcaggagagaaacgatgcccagaagcaactttctgaagaacaggatgccagaatattacaagatcagattctgacgagtaaacaaaaggaactagaaatggctcagaagaaaaggaatcctgaggtattttctttagtcattttcaaatatatttttgtatgtgaatatatttttaaaaaacaactctgtgcaacttggaaagtacaatggatttttgaactacacacacacacacacacacacacacacacacacacacatttgggggtggtgatggtggttctggcatttttggctcattgaataaagtcatgttcttaattcaactccatttgtttgcaagagtcaagtagtgacattcacagtggccttatccaaaggagaaacatttgttatttttcatagaattaatgatctttccacaatctcaaaatccttgctactaacaacagacgttctagttttcagacattatttcatcttcctaatatattaatggagaggttagattattatttccacttgcagtaaggatgaaatgtatagccagttcagaggccgtacttcagaagccgtttcccttacttttgaggagagtaacagtttgctccaagtagtgtctcatttcagtgcaaagagctttgaaaacaatgatatgccataatataaacttggtgataatttattggtaagtgttttttcttagaaaaatagttcagtgtgtgggagactgaggcgggtggatcacgaggtcaggagatcaagaccatcctggctaacgcggtgaaaccccatctctactaaaaatacaaaaaaaattagccaggcgtggtggcgggaacctgtagtcccagctactcgggaggctgaggcaggagaatggcatgaaccctaggtggcggagcttgcagtcagccgaaattgggccactgccctccagcctgggtgacagtgcgagactccgtctcaaaaaaaaaaaaagagaaaagaaaaatagttcagtgtatttcaccttgtttcatgcttatttctgtttcagacattataaagaggaaacgtaagttattgtaataacagataatctcatgattttctaagaaaagctctgtaacttctttttttaccactggtgttttgaaataagcgtcttttatatttatatatttacaacacagaagtaattgtggtttggtggaagagcactagaagtaaagtaagggaacctagggaaaatcctgcaacttgcatattttttgacctctcctttcagaattgtgatataaatgagttcagtgatacatgtacaagtgcttggtacaaggccaggtgcagcggctcacgcctgtaatcccagcactttgggaggccgaggtgggtggatcacttgagcccaggagttccagaccagcctgggcagcatggcgaaaccccatctctacaaaaagtacaaatacatttagctgcgtgtgggggtgtgtgcctctagttcagctacccaggaggccgaagtgggaggatcacctgagcccgggaggccaaggctacagtgagtcttgattgcgtcactgccctctaacctgagtgatggagtggagaccctatctcgaaaaaaaaaaaaagcctaatataatgcttagatttagcatttatgaataaatgtaattcttatataaccgatgagaaaaatgttagaaaaataaatagctatagaatattctcaggaaaaaaagaacttcaagaacgttggaacatttcctctgtccagatatatgcaaagctacagcttttactatagggtggtgtataggttagatgtcagagtgtaaagccaattttttaatgtagtcaaatttattagtctttaatgcctttgagtttgttgtaatttggagaccgtcttttccaattctgagatgcttaaaaattctctagttatttatgttctacattcatggattcattgtcttcaaataaacttatgaagttttgggaatttatgctctatgaggtttgaagtttcgatagaatatttttttccagttggatatccacttatggcaatcttttcattgtatacatgtataggttatttaatttcagagaaaatcataatctgtcattttattgagtgctactgaatgtttcctttcttacttagatttctcataggcatcagaaagaaaaggatctctttcatgaaaattgcatgttgcaggaagaaattgccttgctgagactggaaatagatacaataaaaaatcagaacaagcaaaaggaaaagaaatattttgaggacattgaggttgtgaaagaaaagaatgataaccttcaaaaaattataaaacgaaatgaggaaacattaacagaaacaatactccagtacagtggacagctgaacaatctgacagctgagaacaaaatgctcaattctgaactggagaatgggaaagagaaccaagaaagactagaaatagaaatggaatcataccgttgtagactggctgctgctgtacatgactgtgatcaaagtcagacagcaagagacctaaaacttgatttccagagaacaagacaagagtgggttcgtttacatgacaaaatgaaggttgatatgtctggcctacaagctaagaatgagattctttctgaaaaactttctaatgctgaaagtaaaattaacagcctacaaattcagctccataacacaagagatgctcttggaagagagagtttgattttggaacgtgtgcaaagagacctcagccaaacacagtgtcagaagaaagaaactgaacaaatgtaccaaagcaaactgaagaaatacattgccaagcaggaatctgtagaggagagattatctcaactacaaagtgaaaatatgttgcttcgacagcaactggatgatgttcacaagaaagctaacagtcaagaaaagacaatcagtactatccaagaccagtttcattctgctgccaaaaatcttcaagctgagagtgaaaagcagattctttcactacaagagaagaacaaggagctgatggatgaatataatcatttaaaagaaagaatggatcaatgtgagaaagagaaagcaggaagaaaagtaagtattaagaaagataaaatatttttcaaccttcctgaaagaaaatgtaaagtaatatttggttatggctaaatgttgtatctagttgaatataaaatgtatagatcataaatgtatttgctgtatcagcctagaaatgtaccagtgaaaaagaagttaaacctgaaagatgctttactttgcataaagaaattgtgtcacctatgaaattttaagttcagttacagtgttaataggtacagactaatactcatgatgtagtcttatgctgctgaaatgatcattgcaatgcctttatgtggccatgttttaataccatgatgaagcagataaacagaaatgctcatacctgacatgagtattttgaaattaagattcagtggggagggttgctttgaccgttaattccagatttcccaggtgaactgaagtatactgctgtatctcataatacttttccttcagtaattttgtaatgtatttaagttggtataattttatttttattcatatcaatttgacttaaatctgagacgatttcagtctcaaattacttgttatgaccgctcaattctttaaaggcatttactttttttttttttttttttttttttgagatggaatcttgctctgtaagttttgtatttttagtagagacggagttttgccatgttggcaaggctggtctggaactcctgacctcaggtgatccgcccgccttggcctcccaaagtgctgggattagaggcgtgagccactgtgcccggcctaaaggcatttactttttattaaatcataatttgggacagatgtgaatttcagcaaagccatgttacatttaatcttaccactggtatttatcatttactttgaatgtttttacaaagaatttgctcataattttcatttcaaggctcactgcctatcattcggatataactgatagtacaaaggtaactgtggctatctgtgatttatttgtttggcattgagtcccattttcaaactaatcagaagtggcaggattcacatatagcaggaatggactgaatcggtgagacagttgtaggagctgagatcaggagggaggtagaggccaggttacctagggcctcaaaggccattggaattttacttgtattgtgagatagaaatcttttagaaggatctgagcaggcaattgaatatgcaaggaactctgaggttgatttgagcttctaataaaaaacagagaaaacattttaccagtgtgggatgtaccaccagcagccccacccacgtatcaaattctttttgagacttcagtaggttgttaagcactgcagatgtttcagggaagagtgagtagtgggctgaatctattgcctaagttaacagaaaaccgatttggcaggaagataacaccttctttgtccttaactaaattcagtaataaacaagaatgtgtgcacatgaggaaaagaaggcgaatcatatatgtgttgatgtttttcaaagtatatgagttagagttaaatcttactaccataatttaataataaggtgatttataaatcagtaacaaaaaataccttcacaggtagttatgagagaattccagcaagaatggaccgatctcctaaaacaacaacctacgtcagaggctacctcacgttgtcacattaatttagatgagacacaggattcaaagaagaaattgggtcaaatcagaagtgaagtatgtatgaaacataacatgtcaacagttaatctataggtggtgaaataatgtcagatgttttaggatactgattgcagtggatagctttcttttgtatttttattataattcattttattacaatttaattatctttataatacacttgtttcttaccatctggctttcattctgtccttttctcctcataagtacattttaaaaataaggatcatttccaaagatccttaggaaaattgggaattattcagtattcctcacagaagttgagaggctttttttttttcctgtgaagtagtatttttttagtgatttctctattgccatggtgaggcaagccagattaaattataggataatgtttaatagaatgttccagaaaattgtcttatttcttatctttacttttgtgaatgggtacagaatctgtgtatatttatttcatgaatttcaggataactggtacagaaaggccatagtactgttctccaaaatgcaaatgttttaatttacaaactacttgaaatgttaggtacttcctttattttcctttcattttaaatatattgtgcttttttacaaatcatgtatagtatgtacatccaaagtagagaattaagagatatatctagattctaccactgaatttttaaaaacaagtttactgagagagaattctcataccatacagtttacccattgaacgtgtacaattcatggtctcttaatatattcacagagttgcataaccatcaccatcatcaattgtaggacattttcatgaccctgaaaagaatcagcaatctattttgtttccatagattagcccattctggacaccacgtatcaattggatcacacaatgtgtggtggtcttttgtgactggcttcttctacttagcataacatttttaaggttcattgtgttgtaacatgtatcagtatttaatttcatcttattgctgagtaattttccactgtatggacataccactaatttatttagccattcatcagttgatggacctttgggttgtttccatgttttggctattattaatcatgctgctgtgaacttttatttacaagtttttgtgtttgtatatgtattcctttctcttgggtatatacatatgagttgaatttctgggtcatatggtaacactatgcttaacattttgaggagcttccagtctgctttccaaagtggttgcaccattttacattcccatcagcattgtatgagggttctaatttctccacatccttgccaacatttttcatatttttgattgaaaaaggattccaacctagaggtatgaagtggtacctcattgtggttttgattcacatttccctaatgatgaatgactttaagcctctttttatgtgcttatgagccacttgtatatcttctctggagaaatatctgttcaaatcttttgcccacattaaaattgggttgtcctaaatttctgaattttaagagttctttatataccctaggtgtaagtcccttatcagatatgtttccaaatattttcaatggctttcctttttattttcttttttatgatttattatgtttttaaaatttatataattttaaattgtagagagaaggtctcactatgttgtccaggctggttttgaactcctgagctcaagcaatcctcccacctcggcctcccaagtgttgggattataggtgtaagccaccatgcccagcctccttttcactttcttgatggtctctgttcaagcacagaagtttcacattttgatgaagtccagttaattttttgtttgtttgttttgcagtcacaaagatttatggctatgttttcttctaggaattttatagttttagttcttacatttagcggttctattttgttacttttagatatgacatttggtgaagtccacctttattcttttgcatgtggatataccgttttcccagaaccatttgttgaaaaatctattcatttctcatttaattttttttacacctttgttgaaaatcagttgaccataaaagtgtgggtttgtttttggattctcagttctaatatattgagctatgtctatccttatgccagtagcaaatcacattttaggaaaattcattttcagtcctgttgcttattaccagttgtcttatgtaagaatagaaattcaagtagtagaatgtctttaatttcactttttgcttcttgaaggagtgtatggccagcttatgccttgctgactccatgacatgatgagagtcaggcttatgaagacagatcccattaattttttttctccagtcataccttttgtctctcacccagtgcctctctcttcattcccatttccatcaaatcttggtcacaggatatgctgactccgtctactatttactgcattatgtttttattaactcattgtaagtcatagagtcatgtgtagattttaactatctatgaagggcaagattaagtctaggctgtcatctttcctcattggaaattgagctaattcatcatgttgcagtttacagttagatactcttttgacccagcacccggttctcttgtacactcccggagctgaatcctcttcttggcacagatactacattctcagaaaccagagttccctgcatttacctccttttgcttaaatagagatgcatagctatgcttttatagttcaatacataattcattgaataaatacttcaacccattcaaagaacaacttccaggagtgcagcaactggaaatcaggtcatgtccaggcatttatcagaaacaaatggttgaattagttgtatgaatttcaaaatttcagagccaatttgtatgatatggagaagcattttgatacaacataaagatgagatgctcttcccttctccatacaaatgagcttgaagtaaggtaaaggggaaattgcatttaatagcttaacactcaaaggacactacatttttacttctgagattgttaaaactgattccataatattttgttaattttctcagtgaggtaatggaaatgaagattgaatcctagattgactaataaatatccaaagctgcttatcacttttagaatttcagttcattgaaatcaggtacaatgtctgatttttggttattaatcaaatatttctggttttttcaactttatacttcaaattatatatctccttcgttcttcatcttccttatttcataactcgggggacaaattctaaaagcctcactggcttagtcatcagaatttgtaatcgaaaggaactttttctaaacttcctctgcagtagttcttacatccttctcctggttgtctgctgcttcccattagagttgtttgtcattaataaattaacctcaacattttttagatcttactttaaaggagactaatttctactgggtatgttattctatttcttgttgtctccttgtttaaatttatttttctggttattttttcctaacaaattacccaaagttgagtggctaagaacaacattcgtttagttcaccaatctgtggcttgggaaaaccttggctgggacagcttgcctctgctcccttcagcttcacttgggataaatcaaaggctgagggactggaatcatctgaaggtttgttcactaagatgtctgttgctgatggtggctattggttggaactttagctggggcaggttgcccaaatatctacattggaactcctaggctctctttgtggcctaagcttcctcacaacatgggggctggggtccaagggtgagcagtctgcggtagagagcctcttctaacttaatgttcgaagccacatggttatcacttttaacactttctgttcattagaagcaagtcactaagtttcacctatagtctatatataggatgaatgattttgcttttatttttattgatgtattttttttttagacatggtgtcttattatgttacccaggccggccttgacctccatgtctcaagaattcttcctgcctctgcctcccaagtagctgagaccacaggaatgtgacaccacacctggcttcctttgattttttgtggacctgtataattgtacatatttatggtatacacagtgatattttgatatgtgtaaacaatgtataatggtcaaatcaggctaattaatatattccatcacctcaaacatttaccatttctttgtgttgtgaactttcaaaatcctctcctctagctttttaaatattagctagccaagccaggtgtagtggcacacacctgtaatcccagctgtttgggaggctgaggcaggagaatggcttgaaccccggaggcggagattgcagtgagctgagattgcaccactgcacgccaagcctgggtgacagagcaagactctgtctcaaaaaaaaaaaaatattagttaaccatattcaccctacaatgcaacagaacactagaattcattcctcctatgtaactgtaatcttgtatccattaaccagcctctccccatcttctactcccctttacctttctcagcctctaatacccacagttctactctctacttccgtgaacgtttttttaaattttagctcccacatgagtgaaaacatacagtagttatttttctgtgcttgaattatttcacttagtgtcacttaatggcctcatccatgctgtaaatgatatgattttattctttttttatggctgaatagtattccactgtggacatataccacattttctttactcatcaaccacattgatctgttgatgaacatttaggttgattctgtatcttggttgttgtgaatagtgctgcaatcaacatgggaatactggtatccctttgatacgctgattttctttcttttggataaatacttagtagtgggattgttggatcatatgacacttctatttttagctttttaagaaacttccatggttatactagtttacattccctccacgagcataagagttttctttttctctccaacctcgccaggattttttacttctggtttctttgttttttgttttttgatttttttgatagtagccattctgtggtgagacgatatcttatttgggattttgttttcattttcctgttagtgatgttgagtacttttccatacatttgtggacattcgtatgtcttctttttagaaatgtctatttaaattctttctccacatttcaggggggattattaacaatttttactgttgagttgtttgagttcctggcatattctagatattagacctttctcagatgaatagatttgtaaatattttctcccagtctacaattgttggttgtttccttcactttgttgattgtttcctttgctgtgaagaaacctaattttaatatagctttacttatgtatttttgtttttatacctgtgcttttttttgcatatgcccgtgataacttagctataaaatctttgccttgaccaatgtcctgaagcattttccatatattttcttgtagtagttttataattttggatctcatgtttaagtctttaatctattttgagttgatttttgtatatggtgaaagatagggacctggtttcattcttctttttacagatacccacttttcccagccccatttgttgaagagagggttctttccccaatgtatgtttttgatacttttgttgaaaatcaggtgtctgtaaatatgtggatttatttctgcattctctgttccattggtttaattttctatttttataccaagaccttgttcttttggttactgtaaccttgtaatatattttgaagtcaggtggagtgatgcctccagctctgttcttttccctcaggcttggcttgtatagtctagcttttttgcagttccatatgaattttaggattgttttttccatttctgtgaagagggttattggtgtttttttgttgcaagttataaagggcattttatttttatcttattctttctctttcttaactttcagattcagggagtacatgtgcaggtttgttacacaggtatattgcataatgcttaggtttagggtgcagttgaacctatcacccaggtaatgagcatagtacctggcatgtcatttttcaatcattgtccaacccagtcccccttcttatagtccccactgtctattgctcccatctttatgtccatgtgtacccagtgtttagctcccacttataagtgagaacatgtagtatttggttttctgtttctgcatcagtttgcttaggataatggcctccagctgcatccatgttgctgcaaagggcagtattttgttctttttatagttgcatagtattccatattgtatatgtgctacattttcttaatccagtgcatcattgatgagcttctggttttattccatatctttgctattgtgaatagtgctgcagtgaacattgggtgcatgtgtctttttggtagaatgattttttggtggtgggaagtggatatttaaccaactaatgggattgctgggttgaatggcagttctacttttagttccgtgagagaaacctccaaactgctttccacagtggctgaacgaatttaccattttctcccaaaagtgtattagaattccctttttgctgtagcagctctgccaaaatctgggttgttgttgcttattttttgactttttagtaatagccattatgtctggtgtgagatggtatgtcattgtggctttgatttgcttttctctgatgatcagtgatgatgagcattttttcatatgtttgctctccacttttatgtctttttttgagaagtgtctgttaatgtattttgcccgcttttatatatttttttaaattcttgtttgttgatttaagttccttataggttctggatattagaactttgttcaatgcatagcttgtaaatacattctttcattatttaggttgcctatttagtctcttgaatggttccttttcctatgcagaagctcctttgtttaactaggtcccaatttttcttttcttttttttttttctttaacaaaatttttatttaataaatggttaaaatcgcagtgccaaaaatacattcacatttagcaatttcactgaaaggaagaaactacagaatgcacggtttcagaaagctattttaagttatttacaaataaagtatctaaaactcaaaaacaggctctatatgctatatctcgtttatcccttcccgaacaaaatttctgttatttgggcaaattcttaaaccatggtttaaaccgtaatggttacaaaccacaaacacatccatccaaagactgaaaccgtttttatccggtcagtggcaaaactgttgaaagggcaatagttgaagctgttgggttttatatagtgtgaactctgataaatattcctaccaggactaaaacacagcacactttgcaggcatggctgactcacaaaggttgtaacaaacaagaactactcttcactcgacaccatggctcagaggccaacgagaagcacgagtgactgacagctcctctgcttacaaacgaatgaaacccaaagtggatgtcgttctcacagcactgaaagtgcttcaggactcacactgatccaatactaactttcttccctattttacacatatttttctactgtccagtggaaatcattttctgttttggctaaacaacaaatactagtttataacaggaatggtaaaatctgtgagaattctgctcaatttaatacaagatcactactttctttagaatggtttctgcgtgtttctatgtcaccctctgtagttttagcttccagtttcctggtaaggaataagttctccttcccagtcacactcggggtcatttacacgtttctgggatgccctcgctcgtccatggaggccaggtgcgtgcagtgactcactctgcctcttccctcttctcaggaccagttcccgaaccttctgccttgcagatcctcctgtttccgccacactctagcgctcggaagtgagctcctggatcatacagctgcaaggctggccggtccttgtttgccagtcgctcttttctgggtgctggactgtcgtcacacctctgcgctcttcccagtctctccatggcctcccccggagccccgctgtcctggctccccttcttccctctgtcttggccaggtcctttcccccatctctgctcatcctcactccctctggaaagccggtcaggctcgtggtgagctctgtgcctcctgccatcatccacatggtgtctttgtgcttcagattcttgttcttgagatctctccacatccctgtgctctttatcactgccgctgtgtgacgtctcctggggctcctccagcgagccttccacgggcctggcttttacgactgcaccgggggcacaggattcctgcttgccacctccagtatcaatctcctctcctctttcttttggtttctctgtggttggttcctctcccttttctggtttcttaagaagcttaatccttacttctttctctgcaattttcttctgtttatctgtctctctttttttttttgcatctttcttcttctcttcttcttcttttttcctcttcccgcaaacgtttcttttctaactctctcctcctccgttcttctcgcttctcttctcgaattctctgcttttctaattttctatttttaatatattccaaaagaggtgtggttcttctagcaatgagctctcttgtcttcgcctccatctcccccagcagagtctcagggttggcactggccttctcttcctccacacagtaggtttctaaaaacttcttatattctggatctttgctgtcaaggaagatatatcccatcaaaacgatctctaaaaagaaggatgtcatcaggattcctaaaattaatgtatgctcttgagtagagatgaggataaagactcaggtcggcggcgaagaactcgaagtagtcgtgtgctggcaacgggcgcagctgctcctccagctgctccttggtgaggcccggaggcaggcggcggatgaccagctgcggggagcgcggccgttcccacaggggcggagcgtggacaaggagctcaaaaggcaccgcgtaccgcgctgggaggcccggcccccgcccctccctcctctccctcccctccctcccctctaggtcccaatttttcattttgacttttgttgcaattgcttttgagggcttattcataaattattttcagaggctgatttctaatagtgtatttcttaggttttcttgtaggatttttatagttagaggtcttacttttaagaatgtaattcagctttcattaatttttgtatgtggtgatagctaggggtcaagtttcattcttctgtgtatggataaccagtcatcccagcaccatttattgaatagggagtcctttccccattgcatatttgtgtcggctttgtcaaagacccaatggttgtaggcgtgtggctttatttctgggctctctgttctgttccattggtctatgtgtctgtttttgtgccagtaccgtgctgatttgtttagtgtagcgtttgtttactgtagtatagtttgaagttgggtaatgtgatgcatcaggcttggttctctttgcttaggatggctctgggtgtttgggctcttttctggttccatatgaagttttagaatagttatttctaatgctgtgaaaaatgacattagtagtttgataggaatggtattgaatctgtagactgctttgggcagtatggccattttaatgcgattgatttttccaattcatgagcatggaatgttttgccattttttttggtgtcatctatttggtgtcatgattttttttcagcagtgttttgtagttctccttgtaaccacctttcatctctgtagttagatgcattcctaagtattttgcttttttgtgtgtggctattataaattggattacattcttgatttgtctctcagcttgaactttattggtatatagaaatgctatggatatttttacattgatttttgtgtcctgactgaagtcatttatcagttccaggataaattggcaaactctttagagttttttaggtacagaatcatatcatcagcaaagagagatagtttggcttcttttcctttttggatgccttttctttctttctttttcctgattgctctggctaggagttccagtactatgttgaatacatacagtgagagtgggcatctttgtcttgttccagttggcaaggggaatgcttccaactatttttgttcttttttctttaatttttttctttactattttatagagacaaggtctcactgtgttgcccagcctggtctcagactcctggcctcaagtgattctcctgtcttcgcctcccaacatgctggggttacaagcatgagccactgcacttagcccccacttccagcttttgcccattctgtatggttttagctgtgggtttgttatagagtggcctttattattttgaggtctgtttctttgatgcctaatttgttgggtgtttttttcatgaagggatgatggacgttattgaaagcttttttgcatcttttgagttgatcatatggtttttcgttttcattctgtttatgtggtgaaacacatttattgatttgtgtactttgaaccaattgcatcacaaaaataaagctgacttgattgtggtgaagtaagtttttgatgtgtttgctggattttgtttgctgatattttattgaggactttggtgtctacattcattggggatattgggctgtagttttctttattcattgtgtctttgctggcttttagtatcaagatgatgctggcatcatacaatgagttagggagaagtatctcctcaatattttggaatagtttcattaggtttgttaacagctcttctttgtatgtctggtagaaattggctatgagtcagtctgatctgaatctgtttttggctagttggttttttattactgattcaatttcagagcttgttatttgtctgttcatgatttcaatttcctcgtggttcaatctttgttggtttccaaggatttatccatttctcctagatattctagtttgtgtgtatacagtggtgttcattgtagtctctgaggatcttttgtattactgtgggattggttgtaatgtcatctttgttgtttctgattgtgcttatttagatgttctctgttatttatttatttatttatttatttatctagctagtagcctgtcggtatttttatcccttcaaaaagccaacttttggtttcaccgatcctttgtatggatttttgggcctcaagttttctcagttatgctctaattttagttatttcttttctgttgccagctttggggttattttgtccttgttttttagttcctctcggcacagtgtcagattgttaattacagatctgtctaacttttcaacatatttgttttgcactataagctttcctcttatgctgcttttgctgtatcccagaagttttggtatgatgtttctttttgcttattacaaatcattgtttgatttctgcctgaaattctttcttttcccaaagtcatttaggagccagttgtttgatttccatgtgattgtgtggttttcagagatcttcttggtattcatttctatttttattgcactgtagtccaagagaatggtgttgtgtgatttcattttttaaaaatttatcatgacttgctttatggtcaaacatgttgttgatcttggagtatgttctttgtgcagatgagaaaaaagtgtattctgtagttgttgggtggagtattctgtagatgtctgttaggtccaattagtcaagtgttaaatttaagcccagaatttctttgttagttttttgtctcaatgatttgccttaacactatcaatgaaatgttgaagatccccactgttattgtgtgactgagtcttttggtaggtctggaagtacttggttgtttttgaatgtgggtgctccagtgttgggtgggtatgtatttaggatagggatgtcttcttggcgaagtgagtcctttatcattgtgtaatgcccttcttcatccttttttggctgttgttggtttaaagtctgttttatctaagaataacaaccccttgctttttgcattttatttgcatgacagatctttgtctatctctttactcagagcctgtgggtgccattacatgtgagatgtgtcttttgaatatagcagactgttgattcttattggtttgtttttttttaattcaacttgccactctgtgccttttaagtgaggcatttagaccattgaattcagtattaatatttatatgtgagattttgattccgccatgatgtttttagctgtttgctttgtactctcgattgtgtagttgtgtaatagggtctgtgggctatgtacttaggtgtgtttttgtggtagtgggtattgttctttcttttccatatttagaactccttaagaatctcttgtaagtctggtctagcggtaatgaatttctttagtgtttgtctggaaaagattgtatttctctgtcactgatgaggcttagattggagtggtatgaagttcttggctgaaatttctttaaggatgctgacaacaggccccactttctggcttataaggttttgccggaaagaggtcagcttttcacctgatgcagctgttatagctgcctgtgagatttttcctttcgtgttgaccttggaaagtctgatgggctgtgtatcttggggatggttgtagaggttctctgaatttcttgaatttttccatcaacctctgtaatgagattggggaaatttcatggactatatcctcagatatgttttccatgttgcttcctctctctccttctctttcagccatgccaatgagtcatagattagtgtctttacaaaatcccacattcctcagatgttttgttcatttttaaaatggttttttctttatttttgtctgactgggctgactcaaaagacaggtctttgagctctgtaatccttccctccgcttggtctcatctggttttgaagctccctcctgtgttgaattttgcagctccagaagttcagtttgattctttttaaaaatggctctgtcgtgtttcaacttttggatggttatactggcttccttggattggatttcaactttctctttaatctcattgagctttgttgccattgagattctgaatcacatgtctgtgataaagcatgtcattacactttaatctggtgagaatttatagctggggagctagtgtgattttttggaggtaatgaaatgctctgatttgttgaattgctagagttcttgtgctgattattcctcctctgaaaatgctgatgtttctttatcgttttgaaattcctgtcatttggatgggaatttttgtttttatgttcttttttttctcttgagggtttgtggtgtgtattgtgtatagttgattggcctttttttctgggtggtttcagatggccaggactctacacaggttccttccttgtggctacttccctgcattgggtttcacagatgtgtgttgaaggtatatcatgatttttgtttggtggtgtaattcagtctgcaatccaggagatggtgctctagagtacgggctggcatgcctcttttctgtttcagcgtgttggcagcagtgctctggggaagggggagaagtaggattgggaaggcgagagataaccccctcaccaaatcagttcctggaacttgggagagccccctccaatcactgatgccacacctgaattttgagggctgcacacctcccacccttagggcagcggcccaagccaaaagttaggttgccgagagacctacaactctctggggacgtgctggttgtctgggcttggtagagtcagagcaggttgtagagtatgtctgcggatctgcgggtcgtctgttgatataatgtgggtcaaggggggaggatccccgggcagggctgtggttctgtgggtgtgcacctggtgtgatgcgtgcagcccagggttttttgcccagcagatggctgtggggagcacttagctggcactcacccaaccaggcctccctccagtgtctgcccccagggcaggcccaactaggtagttttgtcccccagccttccgtgcccagatcaactggactgttagctgtttcaggcagtggtgctccctcaggcagaggctgtggacagacaggttacacccttcctggacagatcttgtagaacagggtccccaacctccaggtggcagaccagtactggtctgtggcctgttaggaactgggccgcacagcaggaggtgaggggagggctggtgagtgagcattaccacgtgagcttcgcctcttgtcacatcagcagcggcattagattctcataggagcgcgagccgtgttgtgaactgtgcacgtgagggacctaggttgcgtgctccttatgagaatctaatgcctgacgatctgaggtggaacagttccatcgcgaaaccatccccaccccaccgtctgtggaaaaattgttttccacaatgccagcacctggtgccaaaaaggttggggactgctgttgcagagggagcacacccggctcccacactggcatatgaacttgggccctctcttctcggcattgtgagagagaaagctactcctcttcttgagctcaggccacagataccagctcagtatacttgagcagtgtgcttgaatcctgggggtattgagaccaggttcatgactttgtcttctggtctcatggggttgagctttggctgtgctgagggtgggggctgaactgctcccaggcctccggcaaagcactcagatggggcagtggaggctgtgctgtgtgcttacccttgcgtgagtagctaggcaggggccttgggaggggctggtggacaagaaggtacacagaccagatatgctgcagtcccatggtaaatgcagccctactgtcttctggcctggcagtaagcaggagctagagtcactcagagcaagatggagagccttgggggatgggtgcctatggtcatgttttgctgcagccgtaccaggtgcgaaaccttctgggctgtatgcgggtttgagctctgcctctgcctattcgccagccggttcctcttgccagttcagatgtctgtgtgggtccagggatctccgggagctagtatcccagagttcgttggtgggagtgtggtgctgcacagttccttcacccaccccttccttagtttctggattgggaggtaatcctagtgcttggtgactctgtgcaggcttcccagatttattcctcttcagccttgatgcctgcattacctatcaaatttcagtgttttctctccaaagacctactccaagtgtgataatttacttgatattttggtttctctctcgcagagaggcatttcctggctgcatgtggtgaccatcttgtcttcccctaaaaacatcaaaattggtatttaatagagcttgcgttcagtctgtagactgctttcagtaataaggtcatttaaccaatattcttccagtccgtgagcatgcaatatctttccatgtttgtgtcctctacaatttcttttgtcggtgttttgtagttttttttttttttttttgtaaagctctttacaaaatctctctggttaactttattctgagccattttattattttgtagctagaatagtgggacggccttcttgatgtctttttatgctagttgattattagtgtatagaaatgttacacatgctattggcattatttttgtatgctgattttgtggcctgcacctttgctgaattctttagttctaacaggcttttttggtggcgtgtttatggttttctgtatatgagatcaggtcatgtgcacagggagacaatttgactttctgttttccaatctggatcccctttatttctctgacaatttttgtatctgcatccttcagggatattggcatgtagttttcttttgttgttgtgtctttgtctgggtttggccttagagtaatactgacctttagaataaactaggaagattttggaataatttataaaaaattgctgttagtttttccttaaaagtttagtagaattcagagtaacttacccagttttagacctttctttgttggtaaactttattactgattcaattacattaccgttattggtctgtccaggtttccttttcttcttggttcattcttgctggttatgcacttccaggaatgtatccattttccatacgtttccagtttgttggcatatagttgttcataatagtctctcatgactccatgtatttctttgctatctccttttatgtttccctctttatttacttgagttttctcttttttcttgttaatgtagtttgcagttttgctttattagtctacctcgttcagttctgccctgcctttatcatttctttccttctactacatttgagttttgggtctgttcttgcttttttggtttcttcaggtgtattgttaggttgtttatttgaagtctttctcttttttggatgtagctgttaattgctataaattgccctcttagtgcttcttttgtcactttctatagggattgattttttttccccattttcatttgtttcaagatattttaaattttttttcttaatttattgattggcccagttgttcattcaggagcatgctgtttaatttccatgcatttgtacagtttacaaagtttttgtcgttactgatttccatttttattccattgtggtttgagaagatatttgatatgagcttttaaactcaatatatggtctattctggagaatgttctatgtgctaatgagaagaatgtgtattctgcagcttcttaatacagtgttctgtaagtgtctgctaggtccatgtggtctatagtgcaggttcattttgatgtttctttgttgattttctgtttagatgatcccttcaatgctgaaagtcagactatggagtccccatctattattgtactggaggctatctgtctctttagtttcagtgatgtttgccttatatatctgtgtgctcaggtattgagtatatatacctttatgactgctgtatcctcttgctgaattgatcctgttattattatataatgcccttctctttctcttttatttatttttttttttttttacttaagatctattttgtctgatataaatatagctacttctgtgtgcttttggtttccatttgcatggaatatccttccttcctttcacttgcagtctatgtgtctttacaggtaaagtgagtttcttgtagacagcatattatttggtctttttttgtaatccattcattctatctatatctttaattggggaatttaaatcatgtatattcaaagtttttatgataggtgaggacttactcctttcattttattaattgtttagtgattgttttgtctatcatttgttcctatcttcctcttttattgtttacctctacaatttgctggttttctgtagtgataatgtttgattcctttctctttttcagttctgtacctgctctaccagtgagtcttacagttttttgattttcatggtggtagacattgtctttttgcttccagattgaggactcctgtaagcatttcttgtaggatcagtctagtggtgatgcattccttcaggttttgcttgtctgagatgttatttctttttcagttttatttatttattggagacagagtctcactctgttgccctggctggagttcagtggcatgatctcagcttactgcaacctctgcctcccaggttcaagcaattcttgtgcctcagcctcctgagtagctgggactacaggcatgagccaccatgcctagctaatttgtatatttttcgtagagacagggttttgccaaattgcccaggctggtcttgaactcctgagctcaagcaatcccccaaccttggcctcccaaagtgctaggattacagggatgaaccactgcacctggcccctctttttcagttttaaaggatagctttgctaggtataatattcttgacaggcagtctttttcttcccgcatattaaatatatcatgtcattctctcctatcctctaaggtttctgctgacaaatatgctatttgatatggattcccttgtatgtgacttggtgtttttctcttgctctttgtctttgacttttgacatttgactctgatgtgccgcagagaagacattttttattgtatttctttggggatctttgagacatctgtatccagatgtttgcatctctcacaagacttggtagtttttcagctattatttcattagataggttttctgtgccttttcccatctcttctatttctgcaactcccaatatccgaaaaaattttggctcatgatggtccatatattacatacactgtcttcattctttttcttttcttttttttctttttgctttttgtttgcctggcctcatataaagacctctcttcaagttcagaaattcattcttctccttgatctagtctattgccaacattctcagttgtttttattttatgtattgaattctcagttccaggatttctgtttggttccttttaatgctatctttttcattgttgaatttcttatttagatcataaattgttttcctgattcatttgtattacctatctttcctatcaggaatctttcctgattcctttgtattattgtgtatctcactatgtttccttaagatcattattttgaattttataggttttgttttctttgggatctgttactggagaattactctgttcctttggaggtgtcatgtttctttgatttttcatacttcttgtgtccttaatgttgataactgtgcagctggtataacagtcacttcatctagttttaggggttgacttttttctgtagatgtatctatgttgttggttgaatatggtgctctggcattgatgatgggtgggtgcattggtgtggtctccatatacttatgctttcttctgctgtaatcaacatcagcgtctgtaagttcctcagtggcttacggtgtggttgttagtagcaggggatgctgtggtgaggccttgatggtgatggggaggacagcaggccggtcctcaggcacattgatggcatacacaaggatgtatgtgtgattggcagcaccaggccatgcttcccagtttttgtggcagtgggttacctgagtgggctggcccttgggcctccaggtggtgtgtgctgggatcagaggtggcaatagcaggccaggccacaggaccttggtgacacttgtggcactggagatgacagtagcagctgggggccggaccttggatcccttggtagcatgcatgggcactggtagtggtgaaagcaggctgcatgggcatttctctggccccctatgaggaacatttaggtgggtacctaaggcagtgtgtggagcaggcttgtccacaggttaactgaagacacgtgcaggaacctttgccagtggctggtgaggcagccctgtctttatgctcctggatgccatgtgcaggtgccggtggggcagtaggactctccttggtattagtggtagacggggcctgggtaaaggcacagaggcctgggtggggtggactgctcctcagggtcctggacagtgtatgtgagcactgatagcaacaatagcagcagcaagcaaagtggccttgtcttcaggctctcatatggctcacatgggcgccacccctggtgggtttgacaggcttgttctcaggctcctgcatggtacactcgagtgggccagtcctccggcctcctaaaggtatgtacaggtatgcacagcactgcccctgaaggggatagggctgctggtggtggcagtggtgtcagtcaggtggctcctaggctctagacagcacatacttaggatccctttgacctagagtagtttccctggtgggctattaggtgaccacctatttccacaggtatatggtgctgtgggactagggatttgggggaatcagtcctagttttgagatgatcctggctgggctggctacctcagttccctttcctcctgtcatcagaggatccctatcaatttcctgctgaattccagtatactctctttgatgttttcctcaaggtgtggttacctacttgctgttttggtttttctttttgaaagaggtgagtgctgggtattcccagtcagccatctcgatgatgtctctgtctatgctgtgcatattaaggaatgtatagacatgttttaaaacctgcacaactgaccctataactataatttaaaagatttctaccacttgaaaaacacactaatttctaattattacctctcaccccacacacaggttttatttaatatggcagcagactcaggcttaaagtgcaagatcctaacctcccaccacacacacacaagtttcatttaatatggcagcaagctcaggcttgaagtgcaagaccctaccatctttatcacagatggtagggatgcaccctgggttgtggtttctgcggtataaccccttgagtgcatttcttgtcaacacaaagacgtaagaactaaagggacaacttgtctaccactcacccacccagcattctcctaaactgccagagaccctcctattgaacagagagaaaatgggagtcacaaagggaatattagaccatagaaattctgaaatacagcctgatgtgtgcttccacttacttgatttggacttcatgggaaccatcctctgtggctttttgtgataccttcttggctctttgttgtatccttttcataagcaatgacctgtgttttcagctaagtagtttcttcagccagcttcctccctgtagaacctcttaggtcctaaggcctctcttcatttttactgtcttgttgtcttttaagccaagctagcaagcagtgctattgttactataattctcttagagtctcttgtgaattttacttgagttcttgtcattggaaaaaccacttgtcccaatctctttgagataagcacttcaccttgtgcttcctgtgaaggaagcacactgttctgtgtagtaggacagtgccttaagatgcttatacccttaagatctttaagggaatttgaggcaccaccttaaatctttctaaggtcttaaaatagggccttacactgacagtcttggcttcaccttcagactttctcctggcggcaccctggatttgatcttatctcagaggccatttatttcagcaatacagatgctcctcagattaggatgggtttatgtctggatggcatttgcatttgttatgtctgatatttgcaatttataggccatcataaattgcaaatatcagaagttatgggtgggttttccatttacgataatttccacttacagtgactttatcctgatgtaaccacccctgtaagccaaaaggcttacacatatcatttcattactcaacacatatcattttcacagtattataaaaagtcagaaaatggtgagtcgaaccatgctaagtcaaggactgtctatatttgggaatctgacatgtggagaggctataaaaaggatactgaacctagaaagtcctggttcttttatatgtagtagtctttctttagcttatctcttgcattggttttactttcagcggctgtgtagtaacagtgccctttccttcaggttcccgtatcgtcttcttcactatccttgaagcccttcctaccagcttcttcgaggaccatcaggcttccactaacagtctctttaaaactcttcttgtttttgtgcttattcttctgtaggtccttttagcttctgattagctcctggtccaatggtagtcctacatgttttagtagtttttgttgtgttgttgttgtgcaatctatatgtagtgtcaatatctgtatcagttatttcttggtatataagaaaatgcagtgtctcaaaacaacatctattttgttcacaatctgcagttttaggcaaggctcagtgggtccaactcactttctctttacttggcatcagctgaggtgacttaaagctggggactagaatcatctaaaggcttgtttatttacctgtgcggcattcgaagctggcttttggctgggacgttaggtagggaagtcagctcgaacacctacctacatgagggttcacggtgtggtttgggctttctcacggcatgttggctgcattttaaggacaagcgtccctagagagagagtcaggtagaagctgtgtgactttttgtaaccaactttagaagtcacacagcagttctgccacattgtgttccggagaagccggttgtcaatgccagcttgtattcaggagagggaatgtcatgggagaagtggcaagcaatttgtagatgttttaaaaccaccacttcacttacctttataaaataaaagacaatcataattatttcctctaaaggaaagcagttatttccaactcagcaccactgaaatttcagtgcaattttttgttgtcattctttaatgtgctcccttattttgtgtaaagtaacaatgaattacaagattgtgctactgaattaaggcatttttcttcagaaaaatggtatggatcatgccactgaacttttatactgggagatgtgattgcttcttaactccaagtatcattactctttgaaatgtaactcaaattagcgtaagacatttgcagttcagcaaaaggcttatggtattggaatcctttttttttttttttccaaaatgtattaattagagtcttattttcagagtcttattatgggagccatttattgactcaggcccaaataattcaatatgatgcccctaaaacttctctgcaaattatggagaatgatagtgggttaaaggaataagagactttgtgctaaaggggtaacttagagccattttaaggaggaaagccatgaaaccgtcataggaaaacagaagtctaagatcaagtccaaatgttgtgtggcaaagatgatgaaagtaaaggatgtatttttgtgaattctggtggttttaactttgtttttaattttctgagtaatccaagggtctgtattttatgaatctacaacagtataggtaacattttattgcaactgaatttatttcaaaaattattagttttggctgggcgcggtggctcacgtctgtaatctcagcactttgggaggccgaggcgagtggatcatgaggtcaggagatcgagaccatcctggctaacacggtgaaaccccatctactaaaaataaaaaataaataaataaaaaaatttagccaggggtggtggtgggcgcctgtagtcccagctactccagctacgcaggagaatggcctgaacccgggaggcagagcttgtagtgagccgagatcccgtcactgtactccagcctgggcgacagagcgagactccatctcaaaaaaaaaaaaaaaaaaaaaaatattagttttttgttagaccattctcagtctaccttcttcattaccaaactatattgttttactcatgcagattgaccttacagaagcacaggaaactgtaccttcacgatgtctacatctggatgcagagaatgaagttcttcaacttcaacagacattattctctatgaaagcaatacaaaagcaatgtgaaacactacagaagaataagaagcagctgaaacaagaagtagtaaacctcaaaagttatatggaaagaaatatgttagaacgtggtgaagctgaatggcataaactgttgattgaagaaagagcaaggaaggagatagaagaaaaattaaacgaagccattctcaccttgcaggttggtttatttatctgtaatgtgctttcattcatttcgctgcaaattttattttggatatatacattgtacatgttttctctactttccttacagcaatttgtttggtagacttctagaaggaaggtggtatttgtttctccatttaaatatttttgtttccatcattcttataactaaattgatcttccataagaataattctcactagagaatcatttaattactaaagccagttggcataaaacaagactaatagaaaaagtaaaaaaaaaaattgtgatttagaaattataccatactcttgaactgcttttaagttacgttgttccacttttaaaattttaacttggttctgtcattctttggagaattgttcaacaattcagattcagttattaattcagttggtactggtcataaatatgttaagcttgagcttctttctttcttcacatttttcttaaaattgttctctgaatcacgtacttaaaattgttctctgaatcactgactccaaacaaaaggaaacaaatacacagtaattattcaggttacaattacttttaaaatgttcccttttaatttattttagaaacaagcagcagtatctcatgaacagttagcacagttaagggaggataatactacttcaataaaaactcagatggaactcacagtcatagatctggaatctgaaatctccagaataaaaacttcgcaagccgactttaataaaaccaaattggaaagatataaggaactctacctagaagaagtgaaagttagagaatccttgtcaaatgaactcagtaggtaagtcaatatgcagaatcatagaaaataagttaagctcattaatttgccttcaaaagcatgacttttagtgagacaggttcatgagatttgtgggaagtgaaagctaactagatcatacaattttggaaaattgtaaattatatatagtaaatgaacttaacctttaagtaaaattgaaaatagtaaatgaacgtaacctttaaaatctttagtccaggacagttcctgtctctcctgttttttgggtttatgtggcttccccccaccccttaatattcttatatagttaacctgatctattagggtttcagctaaatatttatgaagcttcataatttagacagtgataccattataaaaattgcttgtcagtattcccttaattcaaaatactaatgaatttaattaatttctggaagacgacagctgaaaaccaaaagggtcaagtacgactactctggacacattctggcactcagtaaattcactttgcttgattgtgatcattagagggtgccttgagaagaagtgtcctgtatagtttttccaatccacataaaggcacacttgtgaagcagagaatgatcaactagggttgaagggaagtataacttactaagtgataaaaaataacaccttggtcagcctgagggggtatatggaagacagaaagggcaggccccacctctgatacatgggccgcagtgttaggagctgattgtcctccatgctgctttagttctctttgatttcagcagtcttattctccccaaggaaaagtcgccgtgaatgattcctcagtgccaaatgctcaagtttttccagataatgggtgaaatatacaagggtggtgaaaacaattgtttgaaaatgtctttgagagagagttttttagacaatctctaacaacatgtattgtttactaaatacaagtatttctagcttttatttttacttttagttttttcttgtatatatttaaggagtacaacttgatgttttgatatatttatacgcagtgaaatggttattttgtcaagcaaattaatatcttcatcatttcacatagttacccttggaatacaagtaattctaatggcatccttaagaatcgtataagtagagtcattccagatgggcaacaagtgttaactatgaagccatacatcattgatagtcttttctgtcccctccctctctttgaactacttgtttgttagaaatccctctagaaatagatgtacttctttagaacaatgttaaaactataattggatacagtaggcatgctctaacacattttcagagttaaaacacggcttatggtatattccatttactcttaatggcaacttttagaacaatcgaagtcatttaggaatcatttaggaaaaaatgaaatactaagcatttgtcttttgcaatcttcatagaactaatgagatgatagcagaggtcagtacacaacttactgtggagaaagagcagaccagatccagatctctattcactgcttatgctacaaggccagtcctagagtcaccttgcgttggaaatcttaatgatagtgaaggtctcaacagaaaacatattccaagaaaaaagaggtctgctcttaaggacatggagagctacttgttgaagtttagctatcttttttccttcggcgttcagatttctgatagaattcttgtatgttatttggtaaaatactcagttacttaattgtcttgtgtatggtaagtaaaagtaataattacctgtgttaataaagagaggagacagaaattttacagttattttcaagtctctggagctctcattcataagagattactcctttgttaactttatttaataaatgtaaccaaactgacacattttaaatttttttaaaaactgcatttaagttagattttaaccaaaggtttactttgatgtgctttgtcttactaattgattttagtttgtctggggttcacttttaatgggtttagtgtgcctggggtcacttttaaagtttttctgcatcatctcaggttttctacccgtcatcatatgtgaatgattggtgtccaaacactaaccacccatggatgtttattatttaaaaggacccaaggtgaacacttttatatgttatataaacctgcaacacttgattaatctgttctttaagttaaaagttttgtgattttcttacatgagtacatctgtaattgctattgcacttaatagtgttttaatcccaattttagtaaaatgtgtctgttgctatgcaatagcacagtggttttgaaatagttaaatcaaataaatatttgaatttttaaagtaaagctcacataagttttgtctctctacctggccataactttagtaattgatgactaagatggcaatggtatctagagtccttcaatagcaaatgtgaccaaacagaatcagttctattcttaataccccaaattccatgtaaagctgcacatggacatctcccctggacatgtaacaggaaccttttagttcaaccgtgtggtttcactcagagtaagagtctatttctggggatttcaaaatggatccaaaaatgacgagctgtatcaactatagagttggtaaggaaaaaaaaaaacaaaacgtagttcaactatgcttgacccagattaaggtatttgtctaacatttgtccatttttcaactgagggaaaattacaaaaactgggcacagtggcacacacctgtagtcccagctgctcctgaggctgaggcaggaagatcacttgaacccaggagttcaaatctgcagtgcgcaatgattattcctgtgagtagctacggcactgcagcattccaatctgggtaacatagcaagattctgtctcttaaaaaaattacaaaatccataaaacatttgtttgaacaacaatagataaatagttttctttgtgtatattgttgtttttaaaattttcaatcgatgcacattggcttatagttttgatgtttttatgatctccttagcgcacagaaaagtagcgcaggcccacatggaatgaacctcaaccttgttgtgtttacctggctatttcgtgtcctaacaaatcatagaagagcaaatctaaggtttcttagatagcattgtggccaaatagcttaaaagggaatgcattaaatgattgttttaatacatagattacaagagcccagctagctgatatttttaatcatattgttcgcttaggttttatttttctgaaaaaaatgagatgatcagcgtccaaatgcctcagtcacgaaattgtaccactgggtactaatgggaaatgaatgttaaatacgtctgtaaatggttaagcaagatgcaaatataatgttctcattagtactatgaaccccccaaatttgagacaagtctcaattaatttagaaagtttattttgccgaggttgaggacacacatccgtgacacagcctcaggaagtcctgatgacatgtgtccaaggtggttggggcacaacttggttttatacattttagggagacatgagacatcaatcaatatatttaagaagtacattggttcactctggaaaggcgggacaatttgaagcaaagggaggaagactggtagcggggagggggcttccaggtcacagatagatgagagacaaacagttgcactcttttgagtttctgattagcctttccaaaggagacagtcagatctgcatttatcttagtgagcagagaggtaactttgaatagaatgggaggcaggtttgccctaagcagtttccagcctgagttttccttttagcttagtgattttggaggcccaagatattttcctttcacaatacttaccagaaaaacaaggtaatgtatcattttacaagatggtgctgagagagtataaaaagcagatgtaggccgggcactgtagctcaaacctataatcccagcaccttgggaggccaaggtgggtggatcacctgaggtcaggagttcgagaccaacctccaacatggtgaaaccccgtacctaataaaaatacaaaaattagctgggcatggtggtgtgcgcctgcagtcccagttacttgggaggctgaggcaggagaatcgcttgaacctgggaggcaaaggttgcagtgagctgagattgtgctgctgcactccaacctgggcgacagagcaagactccatctcatgggtgggggaaaaaaataaataaaataaataaaagcagatgtgatgcaagggaagatttttgaggaactttttttttttaatttctgttttgtggggaagggggtgttcattttttagtatttctagataagtagaaaatttgtttgttttaaagttaatgttaatgtagtagttccaaggcatacctagtttccttgtggggcattttttgcccaatcatgttagatttactaaaagagatttaaaagcatgattatatcaagatatgagtgcttggtgcggaggctcacacgtgtaatcccagcactttgggaggccgaggcgagtgggtcacttgaggtcaggaattcgagaccagcctggacaacatggtgaaaccctgtctctgctaaaaatacaaaaattagcctggcgtggtggcaggcgcctataatcctagctactcgggaggctgaggctggagaatcgcttgaacccaggacgcagaggttgcagtgagccaagattgtgccactgcactgcagcccaggtgacagagcaagactccatctcaaaaaaaaaaaagtggaggtagttgtgaagaatgtatggtaagattagaaaagtcaaggaagaagaaactatttctataagtgttatacagtcatggttctttttcaggctgtggtggataggcagcaaatggtgctcctcattcccttctgagttcagaacacaggagtcagatagatggacatcaacacactagctctattacagactcatgataactaatgggaggatgtggctcagatgtgcagccacagtattttatcccagattaggcactaacccacagagttttaagtggagaaaacaaatgcttgacacccatcgcaggtgcatgctgcttactgcagagatgacagcagacctgaactcatgtcactgtgggcagacacatcttttgaaagagaccctgagccaagcaagcacactgtgtgctttgcccaaattcacccattaggtagatctgatatcctctcaagaggaagctataggtagagagagtctaagtcctcatttgaaacctgaggccaggaaaatgaaggttctcctatcatttatggctggatttaagtgataattgaaattaatcccatgtctttgtatgtacaaattagtgattagaagttggacagacgtgtggtagatggtaaagagaaatctgttttgtgttttcagtttttctataagtaactcacaacatggataattgacttgattgattttcctaaaccacgtcttatttggaggagaatgaatagttcttttaaggaacagttttcttaatttctgcttgcttggttcaactaaagattttctccttcaagttttctgttctgcgttttgaaaaatgggttctttataaattgagtgtcttgactggtactagccagaagttatgatattaattgttctttaaatttgattcataacttacaatttggagagctactattttttgtctcatgcttaaacattatagagcatcatgacagtttatagatgcattttctcttttttttgttgttgttgtttttgagacagagtctcactctgtctcccaggctggagagcagtggcgtgatctctgctcactgcaacctctgcctgccgggttcaagcgattctcctgcctcagcctcctgagtagctgggactacaggtgcacaccaccacgcctggctaatttttatatttttagtagagacggggtttcaccatattgtccaggctggtcttgaactcctaaccttgtgatccacccaattcagcctcccaaagtgctgagattacaggcgtgagccaccacacctggactgtctgagttatttttttatttttattattattattattatttttgatgcggagtctgactctgtcatccaggctggagtgcagtggcacgatctcggctcactgcaagctccgcctcctgggttcacgccattctcctgcctcagcctcctgagtagctgggactacaggcgcctgccaccatgcccggctaattttgtgtatttttagtagagacggggtttcattgtgttagccaggatggtcttgatcttctgaccttgtgatcctcccgtctcggcctcccaaagtgctgggattacaggtgtgagccaccgcgcccagcctgagttatttttaaaaatctgtatttcttttctgaatatgaaggaaggtgctggcatagaataactccaggctcagtgaaagatctgaagcccactcctaccttgtaactaattggttttgtgacctcaggcaagctgcaggctctctgagcctgttttgtttcttatgtaaaattaaggactttgactaaatcagtgacattcatacgtttaagtaaatctctttttttttttaagaatggaacttttttaaattgcataaaaccacattatagaaaacagaagtagtgctgcctgactaaaggaaggatcagtgctctgaagctgtgactttcttatcccttaatccttcagcatcctctgtggaaccttagatttctgtgggacatagcttgaaaaggatcatttcttgaattattacttttataaggcctggatggtaatgctgttgtcatgttacctactctataaagcctatctgtaatgtttttgtcacagaaatgttatggaaaggagtctcaaaatattggtaaacctgttagtaaaacaaaaaaattgacttgacacctaaaatttgtaaaggcattagatatcattatctttatcaccacaaactatctcagaccctgttctaggcatttagtgagagaatacctattctaaaaaaaaattaaataagagcactctagatagggacactggcaataagtttgaaatattcccacacctttcataattaagtagataactataacttgtcagatgcttaaaaaatgggtactaatttctgaaaagaaatcaaagttgtagttaaataactctaaattgttttcctagtttttaattctagacactcatgaatcaaagaaactaagattgaaaactggctctaacctgtatttatccttgcttttatgtaaattttctgaaatctttgtgtccgtatgaatgaagaaatgttaatcataatagcataatgtttttaatcttttgccagtggaactttcacatggcatcacaacaatactgctttcttcaagtatgtattaaagattctgtgctgaattaatagcaaagaacatactttgaaattattattttctaaaagtggagaatggagagttcattgtaaggaactattcattaaagtgaaaaactggttagaccttgataaagggcagagttttgataagaatgggaaagtaatgcattcattgcagaatatgacttgaattgtgtaacctctgtactgataagggaaaacatcacacttttgaaatgacatagatccaacagaccaatattaattgtacttttgtgagattaatctaaacagcataacacatatatgttctccattatctaaacttaaaataggtaggaatttatatgatatttttaatttaagctatcttcaagttaggtctagtctgtaaaagtattatttaaaggccgcattttgtaattaatgctccttaccatgataatgtctcttcttaaacgttataaataatatttgacttatttcagatgcagcagaagttgcaaaatgacctaactgcagaagtagcaggtatgttaccaaaatttatgaattaaatttagattaatatatatctgaaataaactgcaaacgacatccctttccgttcttgggctagtagatactacattaaatattctttcatatacatctaatgaaagatgtgaaaacctgaacatgtataatgaagagcatacttatgcctcatgaatcatcacgttccatagcttgaaaaaaatagctcaagaagtctggctctactcttcacttctgccatccctatggaattgtcagccagcacacagaaacggttctcagaaaacagaggcatcatcaacttctcagggttatggtagtgatttttaaggccaaaacatcccagtctcatctagtaacctattcaagcagttacagtttataagcagtcgcttgagaggtaacactttaaatctccagtcatttacagtgtcattggtttacttttgccctcagaaaaagttccaaattccttaacatgtaatataaacacccacattcatttggttcttgtcaagttactcaggcttatctctcaccacttactttactctgcccctttgctctaggatccagccaaactggactgcacagaattccacagtgctcgtccttctcctccagctctttgcacttgcttctttgctctatctgccaacctttttttctcatccttcaggtatccactaaccatgcctccaccgaaaaacctacagtatcgagacaaaactgggataggtgtccctcttgcattccaatagtgccctgttttatacctgtcagggtatctatgacttggtatggaaattgcctatttgtctgctttttcaggttatagcatgtgattgctgaggggtggactgtatcatcttcatcttgtaactccagggcatagtctagtaccttagcatgcggttgttgaataaatgaatgaagaatgagaaaaccagaagctgtgatacacaaccacaatgatcatttagtgtgcaactatgggcagattcttatctaataataagttagcattgtagtcatacatacttttcattcttgttaacactgaaaaagctctcaactcttttttactgatttgcacttagttaactatgaaatatatagaatataattctttggccaggcatgttggctcacgtttgtagtcccagcactttgggagcctgaggcaggcagatcactggagcccaggagtttgagagcagcctgtgccaacatgacgaaaccctgcccctataaaaaatacaaaagcttgccaggcacagtggctcatgcctgcagttccaagtacttggggctgaggcaggagaattgcttaagcctgggaggacgagactgcagtgacctgtgatcacaccacggcactccagcataggtgaaagagtgagaccctatcttaaaataataacaataataataataataataataataataataataataatataattcttgctttttttttcagctgctactaaatatgaacctggatcctatatagcttctcctctaggatttacacacaaggaaaatctgaatcaagatccagttttggaagtagcaaaagaatatgcacagattttaagaagaaaatacatactctgaaagataaggcaattttatttgggctattcacatgatattttgtttcccattaaatatatgatgtgaacatttttactaaagggaaatattctatgttatacatgtctgatgaaaatttatatagtattttaaataatgtttcttggcctcttcagctaacttttaagtggattttgcaaatgaaaaccagtattactgagttttacatactcgaactgcccaaatgttagctgtttaaacagccaaataatcaagttgccattaataatttagtggagccaattgatggcttgtttgtattttataattttatctttatacatagtgatagatttaagtttagatagacatcattttggtatactggtactgtggtcattgtcaatgtttggatatattacgattgttatagtgcaatcaaacttagataattttaattttaagcactgatttatttagatctttccttgtggaaaaataaggtttgcctaaggctttttgcttttttatttattgtttcatttctttattagattaacttttgggaaacagtcttaaaattggagaaaatttccacattttaggaaaaacagctttccccctgtgggccatttgagagtaaattgctgacattatgccatcacatctggtatgtgggtattcccacaagtcaggacattttatataactacttcataatcagaaagttaacatcaatacacttgatcatttcattctcagtttcttttcaagttttcttaattgtctataatgttctttgtagcagaaggatcccattcaggtccatgaatttcatttagttgtcatgactctttcagtctggaacagttcctcagtttttctttgacctttatgaccttaaatcttttgaagagtaaagtccaataatacagaatgtccctccattggatttctctgaagtttttttatgataagatttagatgataatttttttttttggcaagagtatcacagaagttatcccatgatcttctcactgcattctatcaggtgacctgcaattattattattttttattttcatcttttaagttcaggggtacatgtgcaggatgtgcaggatgtccaggtttgttacataggtaaataggtgccatggtggtttgctgcacagatcatcccatcacctaggtattaataatagcccagcatccattagctgttcttcacgatgctctcccttctctcacccgccaccatcccacatgcccctgtgtgtgttgttccccgccatgtgtccatgtgttctcattattcagctcccacttgtaagtgagagcatgcagtatttcattttctatttctgcgttggtttgctgaggataatgttctgcagctccacccatgtccctgcaaaggacatgtctcattccttttcatggctgcatagtattccatggtgtatatgtaccacattttctttatccagtttatcattgatgggcttttaggttgattctttgtctttgctattgtgaatagtgctgcaatgaacatacctgtgcgtgtatctttatactagaattagttatattcctttgggtatataccaagtaatgggattgctgggttaaatggtatttcaggttctagatctttgaggaatcaccacactgtcttccacactggttgaactaatttacactcctatcaacagtgtaaaagcattcctgtttctccataatcttgccagcatcttttcatttttttgaattatagccattctgactgttgtgagatggtgtctcattgtggttttgatttgcatttctcagatgatcagtgatgttgaggtttttttgtttgttggctgcatgtatgccttcttttgaaaagtgtctgtttgtgtcctttgaccactttctaatggggttgggtttttttttcttgtaaatttgtttaagttccttgtagatgctggatattagacctttgtcagatggatagagtgcaaaaattttctcccattctgtaggttgtcggtttactctgttgatagtttcttaatgctgtgcagaagctctttagtttaattagatcccatttgtcaattttggcttttgttgcaattgcttttggcatcttcgtcatgaaatctttgcccttgcctgtgtcctgaatggcattgcctaggttttctttcaggatttttatagttttgggttgtagatttaagtctttaatccatcttgagttaacttttgtatatgggttaaggaaggggtccagtgtcaatttgctgcatatggctagccagttctcccagcaccatttattaaatagggaatcttttccccattgcttccttttgtcaggtttgtcaaagatcacatggttgtaggtgtgtggtcttatttctgggttctctattctgttccattggtctatgtgtcggttcttgtaccagcaccatgctgttttggttactgtagtcttgtagtatattttgaagctgggtagcatgatgcctctagctttgctcttcttgcttaggattgtcttggctatttgggctctgttttggttccatatgaattttaaaatagctttttctaggtctgtaaagaatgtcaatagtagtttaatgggcctagcatttaatttacagattgccttgggcagtgtggtcattttcatgatattgatccttcctgtctgtgagcatatgtttttccatttgtttgtgtcatctctgatttctttgaataatggtttatagttatccttgaaaaggtccttcacttttcttgttagctgtattcctaggtattatactcttcttgtggcaattgtgaatgggagttaattcatgatttttctctcggcttgcctgttgttggtgtataggaatgctagtgacttttgcacattgattttgtatcctgagactttgttgaagttgcttatcagctaagaagtttttgagctgagatgatggagttttctagatataggatcatatcatctgcaaagaaagtttgacttcctgtcttcctatttgaatagcttttctttctttctcttgcctgattgccttggtgagaatttctaatactgtgttgaataggagtggtgagagagggcatctttgtcttgtgtcagttttcaagggaatgcttccaggttttcaggtactcaggcaacaaatagcgttacgaatagaatagtacctcacatctcaatgctaatgttgaacgtaaatggcctaaatgctccacttaaaagatatagaatggcagaatgggtaagaattcaccaaccaagttgctgctgtcttcaggagactcacctaacacatacggactcacataaacttaaggcaaagggttggaaaaagacacttcgtctaaatggacacatcaaaagcgagcaggagtagctgttcttatatcagacaaaacggactttaagacaacagcagttttaaaaagacaaagagggacattatataatgataaaaggactagttcaacaggaaaatatcacagtcctaaatatatatgcacctaatactggagatcccaaatttataaaacaattactactagacataagaaatgaggtagttggcaacacaataatagtgggggatgttaatactccgctggcagcacgaggcagatcaccaagacagaaagtcaacaaagaaacaatggacttaaactataccctagaacaaatggacttaacagatacttacagaacattctacccaacaagcatagaatatacattgtatacatcagaacacgggacattctccaaaatagaccatatgatagggcacaaaacaagtctcagtaaatttaagaaaatcagaattatatcaagtactctctcagaccacagtggaataaaattggaaattaattccaaaaggaacactcaaaagcatgcaaatacatggtaattaaataacctactcctgaatgattgttgggtcaacaatgatatcaagagggaaatttaaaaattctttgaactgaacgataatagtgacacaacctatcaaaaactctgggatacagcaaaagtggagctaagaagaaaattcatagcattaaatgcctatatcaaaaagtctgaaagagcacaaataaacaatctaaggtcacacctcacagaattggagaaactagaacagtccaaatccaaacccagcagaagaaaagaaataacaaaatcagaacaaaactaaatgaaattgaaacaaaaaaatacaacagataaatgaaacaaaaagctggttctttgaaaagataaataaaattgataagcattagcaagattaatcaagaaaagaagagagaagctccaaataagctgtattagaaatgaaatgggagatattaccactgataccacagaaatacaaaagattattcaagactactatgaacatcttcacatccataaactagaaaacctacaggagatcgataaattcctggaaatatacaaccctcctggattaaatcaggaagatatagaaactctgaacagaccaatcagaagcagcaagattgaaaatggtaatttaaaaattgccaacaacaaaaaagtccaggaccagatggattcacacctgaattctatcagacattcaaagaattggtacccttcctattaacactatttcacaggatagagaaagagaaatcttccctaaatcatttgatgaaaccaaaatcaccatgatatgttttggctctgtgtccccacccaaatctcatcttttagctcccataattcccacatgttgtgagaaggacccagtaggagatgattgaatcatgagggcaggtcttttccatgctgttctcatgacagtgagtgagtgtcacaagatctgatggttttaaaaacaggactttctctacacaagctctttctttttgcctgctgccatccacgtaggatgtgacttgctcttccttgactccaccatgactttgaggcctccccaaatatgtggaactgtaagtcaaataaacctctttcttttgtaaattgccccgtctcaggtatgtctttatcagcagtgtgaaaatggactaatacacaccctaatactgaaacagactaatagacaccctaataccaaaagcaaggaaggacataatgagaaaagaaagctacagaccaacatccctgatgagcagagatgcagtaatcctcaaaaaaatactagctagctgaatctaacaacatatcaaaaagataatccatcatgatcaagtgggtttcataccagggatgcagggatggtttaacatctacaagtcaataaatgcgatacactacataaacagaattaaaaaacaaaagtcacatgatcatctcaatagatgcagaaaaaccacttgagaaaatccagcatccttattttattaagaccctcagcaaaatcagcatagaagggacatacattaaggtaataaaagccatctatgacaaacccacagccagcattatactgaacagggaaaagttgaaagcattcctcctgaaaactggaagaagacaagattgcccactttctccacttctattcaacatggtactggaagttctagccagagcaatcagacgagagaaagaaatcaagggcatccaaagtggtaaagaagaagtctgcctattgctgtttcccaatgatatgattgtatacctagaaaaccctaaagactcatccaaaaagcttctagaactggtaaatgcattcagcaaagtttcagggtacagagttacacacaagtgtgcacaaatccgtagctgtgctatacaccttcagcgaccaagccaagaatcaaaccaataactcaaccctttttacaatagctacaaataataataataacaataaaatacttaggaatattcctaaccaaggaggtgaaagatctctgcatggaaaactacaaaacactactgaaagaaatcacagatgacacaaacaaatggcagcacatcccatgctcatggatgggtagaatcaatattgtgaaaatgaccatactgccaaaagcaatctacaaatttaatccaattcccatcaaaataccaccatcattctttacaaaatgatgaaaaataatcccaaaattcatatggaaccaaaaaagagcctacatagccaaaagaagactaaccaaaaagaataaatctggtgacatcacattacctaacttcaaactattctgtaacaccatagtcactaaaacagcatgatactggtataaaaataggcacatagaccaatggaacagcatagagaacccagaattaaagccaaatacttacagccagctgatcttcaacaaagtgaggaaaggacaccctattcaacacatagtgctgggataattggctagccacatttaggagaatgaaactggatccttatctctcaccttatacaaaaatcaactcaagatggatcaagaacttaagacctgaagccttaaaaattctagaagataacattggaaaaacccttctagacattggcttaggcaaagacttcatgaccaagaagctcaaaacaaatgcaacaaaaacaaaagataaatagatgggacttaactaaactaaaaagcttttgcacagcaaaagaaataattagcagagttaacagacaacacacagagtgggagaaaatcttcacaacctacacatccaacaaaggactaatattcagaatctacaaagaactcaaatcagtaagaaaaaaaccaatcccataaaaaagtgggctaaggacacgaatagacaattctcaaaagaaaatatacaaatggccaacaagcatatggaaaaatgctcaacatccctaatgatcagggaaatgcaaatcaaaaccacaacgcgatatcacctcattcctataagaatggcaatattaaaaaaattaaaaaataatagatgtcagcatggatgtggtggaaagggaacacttttatagtgttgatactaatgtaaactagtacaaccactatggaaaacggtgtggagattgcttaaagaactaaaagtagatctaccatttgatccaacaaccccattcctcagtatctacccagaggaaaagaagtcattatacaaaaaagatacttgtacacatgtttatagcagcaaaattcataattgtgaaaatatggaaccagcccaaatgcccatcaatcaatgagtggataaagaaaacgtgatatgtacacacacaccccatggaatactactcagccataaaaaggagcaaactggatggaattggagaccattcttctaattgcagcaacctggatggaattggagaccattcttctaagtgaagtagctcaagaatggaaaaccaaacatcatatgttctcatatgtgggaactaagctatgagaatgtaaaggcagaagaatgatacaggggactttggggactcagcggaaatggtgggaagggagtgagaaataaaagactacacattgagtacagtgtacactgctcgggtgagggatgcaccaaaatctcaaaaatcaccactaaagaacttatttatataaccaaacaccacctgttccttaaaaacctattgaaataaaaagtaaatttaaaaaaacctcctggattcattgatttttttgaaggtttttttgtgtctctatttcagttcagccctgatcttggttatttcttgtcttctgctagcttgggagtttgtttcctcttggttctctagtcattttagttgtaatattaggttgttaacttgagatctttctctctttttgatgtgggcatttaatgctataaattttcctcttaacactgctttagctgagtcctggagattctgttatgttgtctctttgttctaattagttttaaaacacttcttgatctctgccataattttattatttaccccaaagtcattcaggagcagattgttcaatttccatatagttgtgtggttttaagtgaatttcttaatcttgagttctaatttgattttgctgtggtctgagagactctttgttatgatttcagttatttttcatttgctgaggagtgtttttcttcctaatttatgattagttttagggtaagtgtcatgtggctatgagaagaatgtatattcgcttgttttttgttggagagttctgtagataactatcatgtctacttgatccacagctgagttcaggtcctgaatatctttgttaattttctgtctccatgatgtgtctaatattgtcattgtggtgttaaagtctcccactattattgtgtgggagtctaagtctctttgaaggtctccaataacttgctttatggacctgggtgctcttgtatagggtgcatatatatttaggatagttaactcttctggttgaattgaaccctttaccaacaggtagtgctcttctttctcttttttgatctttgttaatttaaagtctgttttgttagaaactaggattgcaagctctgtttttttctgctttctgtttgcttggtaaattttcctccatccctttatttttagcctatgtgtttctttgtgtgtgagatgggtctcttgaatacagcatactgatgggtcttggttctttatctagcttgccattctgtgtctttcattggagaacacattgagatttaaggttagtagtattatatgtggatttgatctcatcatcatgatgctagctggttattttgctaacttgtttatgtggttgcttcacagtgtcactgttgtttgtactttagtgtgtttttctggtgcctggtaatggtttttccttttcatatttactgcttccttcaggagctcttgcaagacaggtctggtagtaacaagttccctcagcatttgcttgtctgaaaagcatcttatttatcctttgcttatgaagcttggtttggccagatgtgaaattctgggttggaaattcttttctttaagaatgttgaatattggttcccagtatcttctgacttgtagggtttccactgagaggtcggctgttcatctgatggggttccctttgtaggtgacctggcctttctgtctgactgcccttaacattttttctttcatttagagtttggagaatctgatgattatgtgtctcggggatgatctcctcgtggagtatctcactggagttctctggatttcttgaatttgagtgttggcctgtcttgctagaactaacttggggaagttagttctcttggatcctatgctgaagtatgttttccaacttggttccattctccttgtctttttcaggtaccccaatccatcatagattcgttctctttatgtaatcccatattttttgatggtatcgtttgttccttttcattgttttatctctattcttgtctgcctgtcttatttcagaaagatcgtcttcaagctctgagattcttttcttggcctattctgctgttagtaattgtgatttcattgtgaagttcttgtagtgtgtttttcagctctaacaggtgagttatgtttttctctagaccggctattttggctgtccgctcctgtactgttttgtcatgattcttagtttctttgcattgggttacaagatgctcctttaggtcattgaagttcactgttattcacattctgaagcctactctgtcatttcagccatctcaggctcaacccagttctgagcccttgctggagaggtgttgcagggatactctggctttttgagtcctcaggattttggggttatttctcatctctgtgggtctatcttaaactttgaccttgaggatggggtttttgtggctttttaaattgttattgttgttgtttcctgcttgtttttcttttaacagtctggccactcttctgcagggctgctgcagtttgctgggggttcgcactataccctagttgcctcggtttttcccatagctggaggtatcatcagtgaagtctgtgaaacagcaaagatggctgcctgccacttcctctggaagctccatcccagcagggtactgacctattgctggctcgaaagtgcctgtaggaggtggctggataccccagttgggaggtctcctccagtcaggagaaatgggataagggacctgcttaaagaatgattctggctactttttggtagaccagctgtgctgtgttggggatccctttagttcccattcagtttgggctgtccaaaggcccacaggctgaactggctgagaagcttgaaaggcctaggtggcagcctgccccacccctcaggcactccatcccgggaagaaattagagctctgttagccccatagaacatgagtgacctacaattttgatttgcccttttactggtgatgttggcattgatcacaaacagtggtgtctgctagctttctcctctgtaatgttactttttcaccttgtaattaattaatattaatattttgtggggaggtaatttgagactatgtagatatctctgttcttcatcaaactcaatttattcatttacttgatttgatatttacttgtggtttatttcatttaataggttataatttgacaattttttttaacaatttttttctttttagaaatgttttattttaacaattttagacttatagaaaaatagtaagaaaactacaaaacattcttggatactattccccaaatgtgaacattttactgtatttgctttatcctttctcccccttttcctcttctctttctaggtaaatataaatgtaggtgcataatatagactttttctgaatggtttataagttgcaggtatgatgcctctttatttctaaataattttatgtgtgtctcctaaaaacaaggcattatcttgcataattatagtataactatcaaaatcaggaaattaaaaatggtttactgttactatctcatccataaaccttattttacttttttcagttgtctcaataatattttttatagccaaataatttaagatgggtgatgttacaatccatgatgttgactttcataatccatgatgttgagaggtttcagcatttttacgttgattcttcctcatctctgtgggcctatgtacctttgatgtttgaggttgctgacctttggaggagtcgatctgtgtcaaattattctgtctttttagtctcttttagtccaggatgattcctgagtctttccttgattttcatggcatttatgtgtttgaagagtatgggtcagttttttgtggattttctctcagtttgggttcataggatatttcttcatgattcagttcaggttataccattcaggcaggaaggtcacacaagtgaggctaagttcttcccaatgcagcatatctggaggcatatgctgttacttggctccattactggccagtgttgactttgtttgagaatctaccaggtctgtccatgataaagtgactgtctaccctttgtttttcaccaatgtcttatgtgagcatagtttgaggctctgtaaatatctggttactctaaacatctcacccactagatttagcatttcattgattatttttgttgggtcaattattattatggtggttgccaagtcatgattgtcttcatctttcattccttctacgtggataagtaaaacaaaacaaaaccaaccaacaaataggggagaagggaaaatttattgttttgctgttcaggttccctccgctttgaccagtggtagccatttcaagctgagttcatgtctttttgaactgtccttattgttctttgaatacttccttactttctggcataagctgtttcaaccatactttgtattttctctgccccagcccttgaatcagccattttcatttttttccagaagccctgactttctttaggggacagtaattagaaaccaatatctgggcagtaattgtggtagatacgtatggctattggagttgtcattgctcataggcttcctcagtgaacagagcagaaaaatacagctagatggataaatatacaaacatacatgcttatattcatcgatatttctatattagaatatactgaaaaccatgagttcttcctggtgattctaattccagttgaatcacacatggctcattttagttttttttccctttcagtactcttgacctttgaacaatgtggaagttagaggggctgaaccccacacagccgaaaatttgcctaaattttgacttccctgtaatgtaactgctgactgacctgattaactattgttgaccagaaaccttacccataacaaagttgattaatatatatgctgtatattctatgtattatacactatattcttataaaagtaagctagaattgccttagctattccagctgttttggggttcgatataaattttaaaatagtttatcctaattctgtgaagaatgtcattggtggtttggtagctgacttcaaactatactacaaacctgcagtaacagaaatagcatggtactgttacaacagcagacacatataccaatggaacagaatagagagctaagaaataatgcagcacacctacaaccatccaaccttcaacaactccacttaaaaaaagcaatggggaaagcaatgggactgctggatcaaatggcaattctaagttctttgagaaatcgccaaactgctttccgcaatgactaaacaagtttaaattcccaccagaagtgcataaacgtccccttttctctacaaccttgccagcttctgttagtttttgaccttttaataatagtcattctgactggtgtgagatggtgtctcactgtggttttgatttgcatttctctaatgattagtgagtttgagcttttttttcatagccttgttggccacatgttatgtcttcttttgaaaagtatctgttcatgtcctttgcccacttttgatggggttgtttgttttttttcttgtaaatttaagttccttgcagatgctggatattagacctttgtcagatggctaggttgcaaatattttctccctttctgtgagctgtttactctgttgatagtttcttttgccgtaaagaagctctttagtttaattaggtcccatttgccaatttttgtttttcttgcaattacttttggcatctttgtcatgaagatcatttccaggtcctatgtctgcaatggtatttcctaggttatcgtccaaggttttaatatgttttcattttagatttaagtttttaatcctgcctttgcctcccaaagtgctgggattacaagcgtgagctaccacacccagcgaggaagccaagtttaacgtgtgtgctccactcctccaacctggccaaagggcagtcatcatcactggccactactgaccacagcctttagaaactccccttgaacgtgctgggctgaccttcctctgatcacaggcaaggtaaccatacactcaaggccaatgatcccatctgctgtgggctgggtcatgctcccaatgcttacagaacctgggaggcagaggaaaactctgcccatcccatgggacgttacctgtaagctttgaacaccagaatcttgaggcctatctctttctggaaggctttgtcttcctctaaaccaggaagctggagcaattccaccagattctgtacaacagatgcaacaagaaaattcatgaagagtagatcttaggttgaatttttcacagaagaccttgtaagaacagaaaatggtgagaaaaaaaaaccccgaggtcaatacaatggggaaaagcctgtgaagtgacctggcagcagccacacctgctgtcacctccattcccctctcatcttggaaacagatttgccctttacaactcaactcatagctcacccgccttcagagacttcttggcccatcttagctggaagggatctgttccagcgctgagcttttattttgcttagcatctactcagatgccttgactgtgtgtgtctcacagtcctactgactgacaaactccctgggggccgagatggcatggattcaggtctcagatgctctatggcacctgggagcatcttacacaggtgaagtgctcagtgatgatctggggtcactattctctgcagatcagcatgtctgagaggtaggggctcacagactgtggaactggtgtaagacctttgtcttttcccagctactaacaggtcctgcttgtcacagcccttccatgatacaaagttaagtcattttgtgtctgacacaggcaaaggaaaatgacaggcccttgccttcccggtcctcaagggtcagctgtaagatgatgtcataaagccggatcaggtcctggggccgggggaagcacttgctgtcatcctctggctgctgctgcagcagagccctctgcagacctttggccatgctctcattacgcttgattgccattgacagcttgatgtaagtcaggtaggtggaatgcaccacacgtcagctcaagttatactcagagaagcagaggaactgggaggactgcactacgagttggggctgacccagaggaagtcgggggtgagttggggcaaggccacagcagggccatttggcctgggcttcaagggaccctgtaatcccaactacttggcaggctgaggcaggagaatcacttgaatccgggaggtggaggtttcagtgagccgagatagtgccacttcactgcagcctgggcgacaagagtgaaactccgtctcaaagaaaactaaaataggctgggtgcagtgactcatgcctgtaatcccagcactttgggaggccgagatgggtggatcacctgaggctgggagttcaagaccagcctgaccaacatggagaaaccccatctctactaaaaatacaaaattagctgggcgtggtggctcatgcctgtaatcccagctactcaggaggctgaggcaggagaactgcttgaacctgagaggcggaggttgtagtgagctgggattgctccattgcactccagcctgggcaacaagagcgaacctccgtctcaaaaaataaataaataaataaaataaatacataaaataaataaatacataaataaaatagatatgtatttatgcaaaccatagaaaaatgtttggcaaccatcgcaagatacctgacaatgtgaaatagttttattacaactggcctgaccttcaaaggccttcacagctcctgccttcatgttaccgtctactatgttcctcgtgcaccttccactcagcacaaacaggctgcactgcctccgaaacacatcactggaaccctgcctctgctcctttgtccatctgaatcaccctctccacatttctgaccctgtaatcctgatctcacttcatgaggcagttcgcttctcttttgcatttagctttccccggggtacactgtcaatagcctactgtctgatgtcatcagtcagcacttcatcagaggcaattatgtccacagagcttttggctaattactgtcactcctctttacatgtgtgcatatgcatatcatctttccctaatgagactggaaatcatgattcattccctggagcagtggtttccataagtgaccaacccacagaccagtgcaaactggctgcaaaagagcttcctctgaggaacttattagaatgcagattctttgactgcatgggagaggaggatctcataaatctgggtgtaataggcacagaacgttaggtgtaatatgggcgggactctggactcagcatatccaacaagctgctggctgattccgatgatgccgatgaattgccaggttgggaactgctgcccccagagaacctagcagagagctctgtacgtggtaggtgctcactcccctattgtttgggtgtatgcctcctgataatgaacttgatcgtaacattattgttgcattatgcctgtattgtttccttaggtgaaggaagaatgcttttgagtacctaataggtggcaagctctgtgcctacttacatacatgaactattccttttaataacctttggaaataaagtggcatttccattgggcattagaaatctgaagactttcgtttacagctgttgcaacagcagaactagaattcgacctccgacatttctgctcaccagagggcatgaactgctggtttgtacctggcttgcagataccttctttgggcagcacaatgttcaaaattaaaaaaactaccaacacttctaaactggatactttgtatcaatatctgggtttctggcttctcttcatgggaaacaaacaaacaaaaaaaaaggtttggtgaacaatggggcccacattcctgcagggcaacagtcacatggagactttagatgggcacgtgcccagaacacactagagtccccatcgctccccattctcttacattctgttcccaactaggttcttataggcctgggtttgtgcctgttgcacacttatctactctcttgcttcccactggtcaggaagtctggcaaacttaaaaggcctctttttgttgctctctcctgtatggatctctcatcatagaggtgtgtgcatttctgactttgtgatttcaatactaaggaagctgtcggcacattatcaaggaaaacggggatcgctgctccccaacgtacacattctggtgtgccccagtaaaattctatattcagcctccaaactagctgggaaaaatgtggcaaatcatctacttgctccaattcaatagtgtttagaagtaagaagtcactgtgagcaatgccaccaagtggtggagagactccatgcagaatcgccaccttcagccagagaggctgggaggccgaagacctctctcaatgcacagggccattcagaaactagaaacaaaatgcttgctcatctccctaggccactccttccgaggctttttgagacaaagtctcactgtcacccaggccggagtgcagtggcacaatcaaggctcactgcaacctcaaccttctgggttcaagcgatcctcccacttcagcctttcgagtagctgggatgactacaggcatgggccaccacacccagctgattttttttttttctttttagtagaaatgaggtctcgccatattgctcagactggtcttgaaccaacacatctttagctttttaaaagacagccttggccagccatggcagctcacacttgtaatcactgcactttgggaagctgaggtgggcagatagcttgagccgaggagttcaagaccagcctgggcaacatggtgaaaccccatctctacaaaaaatacaaaaattagctgagtgtgatggtgcacatctgtggtcccagctactggggaggctgaggtgggaggattgcttgagcctgggaggtcgaggctgcagtgagctgtgattacctcactgcattccggcctgggcaacagagaccctgtctctatttaaaaaaaaaaaaagaaagaaagaaacctaaaaacagactggcacttaaaagagttgtgcttcattttttgactttctgtattaattttgtctgttcctttccttaaacaagctgccactgctgctgattcaacatgtttcattttatactttttttttttttttcagacagagtttcgctcttattgcccaggctgcagtgcaatggcatgacctcggctcactgcaacctctgcctcccaggttcaagcaattctcctgcctcagcctcccaagtagctgggtttacaggcatgcaccaccacacccggctattttgtatttttagtagagacggggtttctccatgttggtcaggctggtctggaactctcaaccttaggtgatctgcctgccttggccttccaaagtgctgggattacaggcgtaagctactgggcctggcccattttatacatttttaatgtgtattcttgtttttggaaaatgtgaccagaggactattaaactcttttagcatcagtatagcaaggaggtaaaaaaacaaacaacaaaacaaacaaaaaaaacccattttgtaaaataggattgagtatcgttggattgagcacttaccaagcaactgtgccaggcatttgcgtccttcatttaattcttacaagcctgagtgttcggtattttaattttataggtgaacaaatagaagctgagggtgaaggacctacagctgtcaccttcatctcttctcaacactgccaactgtccccttggatttcccagacagacaacaagggacatctctggtttctcggtgccccctagaaacctcgggtcatttcaaggcattatgcaaatgagaagctttccttctcttcacctcatctcctgatctgcacaaaagtgactgtaggacccagtgtaggtaccgatgtaggcaccaatcctcagtttaccacctgctctctacttgcttccctgccataactttctaaaagggatgtgagccatgtttaaagtcacctggtcactggagggatcttgttctaccccctgtagtagtacctctgtagggtagtacccactgtagggatcttgttctacatcagtggttgccaacctttttggcaccagggactggtgttgtggaagacaattttccacggactggggggctggggggaatggtttcaggataaaactgttccaccttaaatcatcaggcattagattctcataaggagggcacaacctagattgctagcatgcgcagttcacaatagggttcgttctcctgcgagaatggcatgccgctgctgatctaacaggaggcagagctcaggcggtaatgggagcaagggggagcggctataaatacagctcaccactcacctgctgctgtgcagcccggttcctaacaggccatggacggtgctggtctgtagcccaggagttggggaatcctgctctacagagtttccaacctcagagatgaagcatcccctctgtaagtcagaaagaaattattcaagtaggagaattaaaacaggatcacagagagggaggctgaaggatttgacattctgtgtttacttgtatgaggaaaaacagcacatagaggcatccacagtatttaatttgtttggataacagttacagataaacaggtacaccccatatacaattaccaatactttttatacagttcatatttcagtacatcaacactattttatttacactctatttatatacattaacatctttttaaattggaattattgtccatatgttttatattttttattccagtgatttcccttttaggaatttatctgaggggagaatactctgtaattactccataatttgcaggcaaatatcatcatagcattttttaggagagtaaaaagttattaacaacttatatttgtctcacattagaggagtggttaaataaagcatggtgtattcattggataaactataatgcagttgttgaaaatgattaccaggagtttttgctaacatttatgggaacatgcttatgatatgtgaacatttttttaaaaacaagacataaagttgcatatactggaaataataccttcaatattgaaaaaaatactatttaggaaaaaggacagaagaaaatctgccaaaatgttgacagtggttgcctttgtattaagaatataaaaggattccctgcctttttacatttttctctgctttccaaaatttccacatgaatattatacctagtaatcagaaaaaaatacagggacactcactcttatcctttacatttctctcctgtttggacctcagattcctcagtagaaaattaaactagatgccagcctgggcaatatgatgtcactctgtctttacaaaaaatgcacaaattagccaggtgtggtgttgtgcacctatagtcccagctgcttgggaggctgaggttggaggattgcttgagcccaagaaatcaaggctgcagtgagctgtgatctcgccactgcactctagcctgggtaacaaagcaagaccctgtctcacaaaaaaaaaagaaaaaaaaaagaaaaaaagaaaattaaactagacaaattcttaggcctcttttttttttttaatagtcttatatgaagactattacttcatttcctgtgttttgtgttaagatgagctttaaagcaactctgaaaaagaagagggtgcgtataagtaattcatagactgtttaaacaatagtagaggatctaagcatagatcccaagaggtaaagggaatctttatcactttgggaacttttactgataaatagaaattactgtcagtacagtccacaaatatgttgtttatcagccatctttcctccctgtcttcctctagcactgtagcctgtgttccacagaaaatatagtcaataaaattcaacattctttactagcttactctaatttgtggttggccgtaaagtattcctggtagagataatagagataatatttaactggccatgagaaaggaaacactatcgtatatgatacacccctttttctactcattccaacaacgatgatacagcacgtttccttttgaagcacgtgttttttccttgagtgaccagttcaaaagatgatgacagttaatatcttgttactacagaatttgtactcaaaaaagaagtctataacccaagtccaagccagatttccttttctaaaaaaagaattttcctctaagttcccctttttaaatgagctctttagcctgggtaattatgcagtgctagaaccgtaactgcatgatcaaacccaaccttgcttgtttataacagcatttgacagcctcgtgactctcacatagggaaaaagtctcgcctgaaaacccatgctaagctgcgtgtcttgagctgtgccaatttgtattccaggcagcctaaggttcccatcgtgagtttcaggaagggaaattcatggaggaagttcacctctggaagggtgaggagcaataaatagggtgggtgatggacatatgtgacgtttgccacagagaggccgtcagtatgggccttgtggtccgggctctgctttgggacacaaatataaactgtgtgaagtcttatggtagcattcataaccctgatgcttcacccaccttcccatacattagagggacaaacagaaggatcccagctctatggttcttgattgtttgtcaggtagcagccaggcatggagagggaaaaattctttcttttctgctgcactctagatccttccttctctcctccttcttcattctacaccacccccaacacatatccctgcaccccgcccattctttgctctctctcctttcttacacttaactccttcttgctccacagcctaacatgctgattaacaggaccccaaaggtttgggtgggtattaggggccttctcaacaaaagcagcacactcttgagcttgttcttccttttgttgccatctcagataaaaaggccccatgagggaggagacagataagtatagacttggtattctgataactctgtgttacatgggatcagatgtaaatgagttgtaccctgtggtgtttcgtgctctgctgtgttgtcttctcatggtgagcttttctgtgcccttatttcatccagctctggtttctgtgtttcatgttatttctcctagcctctgtaaactctgcagcatactaataatgctctggctttctgattaaagataaatggcttactatcatcacccctggtttgagggccagctcacatgtaatcccttataggattccaaagttgttaaataaatgcagttctttttgtcattttgaagcattcaaaaatttttcaagaaaagctatgatcatataaatagaaattttatccagaatgttacaatgtaacatttgtgaataaatgtgtaggtgctgtatttgctcagactctagtttgggttgtgttttcttttccctttttttttttgagacagggtctctctctgtcatctgggctgcagtgcagtggcgtaatcacagctcactgcaacctctactcccaggctcaagcaatcctcctgagtagctgggactagagacatgcgccacaacgcccagctcatttttaggtttttctttcacatagacagggtctcactctgttggccaggctggtttcgaactcctggactcaagcaatgccccccacctcagcctcctaaagtgctgggattacaggcctgagccaccatacccagccagttatattttctttttccttatatagagtaaaataagggtgagtgaccgagaggttgatgcatagctagatcaccagtttaaatgccttcccacacacccctttcctcctgttccctctacctacaggttgtagatgagcatgagagtgtggagcagagttggcgagtgcaagtcgagcccatcaacctggacagctgtctccgtgctttcaccagtgaggaagagctaggggaagatgagatgtactactgttccaagtgtaagacccactgcttagcaacaaagaagctggatctctggaggcttccacccttcctggtatgttacagtcctgcctctgagagagcaggaatctagcataaaagaaagaagacatgaacaaacaggaggttttgttatttttgagaataagacttttcctgcagcagtgtttaaaacactttctgtacaaggtttttatgttgaatacagagatgaatctttctacaaatatttggtagttccttttcctaaagagcttacaacctagaagaagagctcaatcatgtagaccagtaactgcaattcagtgtgatgtgagaactgccacaaggggtacaacgtggtgaatttgaacttcaggagagggtgaacttctggctctgtggagagaggaagctcaggctagccctttgtggactctagaagagcaactgagcccggagcccccaacacccactgcacatagtcatgtggctgtggcacgctgctgagttgagtgtgtgtgcacaagcacgccagtgcactagggcctgtgtgttcttttagattcaatttacttctgccttctcccttcatggattaggagactgtccttttgtttgtcaggagagtttgaagtgacaaatcttcctattcattaaggtcagtgtaactgtaaggtactggcctattttaatcagatatttatatgtattttctttctttcttttttttttttttttttttggagacagggtctcactgtgtcacccaggctgtagtgcagtgttgtaatctcagctcaccgcaacatctacctcttgggctcaagtgattctcttgcctcagtctcctgagtagctgagattacaggcatgcaccaccaccacctggctaatttttgtacttttagtagagatggggtttcaccatgttggccaggctggtctcgaattcctgacctcaggtgaaccacccaccttggcctcccaaagtgctggaattacaggcatgagccaccatgcccagccgtattttcttactctaatcatgtctctgtcacactactctgtgaagctgaatgtaagtttttcttggaccagaacagcttcccagggaatgatgcacaagaaattaataacactggttgtcagctagctccacagataggaactagagggaaggggcaggcttggggacaaggtgggtggggaggagggggagaccttttttttttttttgagatggaatctcgctctgtcgcccaggctggagtgcagtggcaagatctcagttcactgcaagccccacctcccaggttcacaccattctcctgccttagccccccgagtagctgggactacaggcgcctaccaccacgcctgactaattttttgtgtgttttttatttattttttttagtagagacgaggattcactgtgttagccaggatggtctcgatctcctgacctcgtgatccacccacctcggcctcccaaagtatggggattacaggtgtgagccaccacgcctggccgagggggagaccttttaaaaaaattgaggtataattaacatacaattaaaagcatagatttttaatatccagtttgatgaattttaacaagtatatattttcatataatcatcaaataaaacaagcagagcagtcatgtagcccagtaactgcaattcagtgtgatgtgagaactgccacaaggggtacaacgtggtgaatttgaacttcaggagagggtgaacttctggctctgtggagagtggaagctcaggctagccctttgtggactctagaagagcaactgagcctggaggcaatacccattgcgcagtcaggtggctgtgccacactgctgagttgagtgtgtgcacaagcacgccagtgcattggggcctgtgtagaggcctttaggaaaccatatttttgaagtatttaaaaaataatgaagagcaaatgttctgttatatattcccaaacattcacatgtatttgacttgttttttccatgtaaattttgtatcttcagaacgctttaatgcgatgttttctacctttacttctccagattattcaccttaagtgatttcaatttgtaaatgatcagtggataaaatcacagaaaattgtcaaatttcctcgggaaagttttgatccgagtgcttttttggtaccacgagacccagctctctgccagcatcaaccactcacaccccagggggatgagctctccaagcccaggattctggcaagagaggtgaagaaagtggatgtgcagagtttggctggggaagaggacatgctcctgagcaaaagcccatcctcactcagcgctaacatcagcagcagcccaaaaggtgaggcctgggggccttatgcagttgctttcttgggactcctgtaggctacatatgtttctgtcttctgttctggaacatcaggttggttgggtggaaggaacctatctggaatcagacctatctgtatttgagctatgtaagttttatcaagagattcagcctccctgaatctattttctcatctgtaaaatggagataatgccaggtttacagagttgagagtttgacacatggagagtaaagcacttcacacagtgcctgatgtatggtaaacaggaatggtagctgctgtcttgtccccttatagtgaaagttctgaggttccccatctttcagggggtctagaggatcaaaactctttatttatttatttatttatttatttatttatttattttattttttacttttttgagacaggttctcactctgtcacccaggctggagtgcagtggtgcaacacagatcacagctcactgcagcctcgacctcctggggtcaatcaatcctcccacctcagcctcctgagtagctgggactacaggcacgcaccactgcacctagctaatttttgtattttttgtagagatggtgcttcaccatgtttcccaggctgggctcgaactcctgcacccaagtgaacctcctgcttcggcctcctaaactgctgggattacaggtgtgagccactgtgcctggcccaaaactattttcataaaaatactaagacaatatgtgccttttcgcttttattctctcacagatgtacaatggtgtaagagacgacatggaataatatcgtcactttgacagtgaagtctgtgctaatgtattgtactttttcatgcctcagttttagtttctaatacaggaaatattgatagataaaattcatataaaagttctaaaggttctcaataatttttaaaggtataaaagggggtaggggtaagaggctataaccaaaaagtttaaagccttacaggatttttgtgagacatagaggtaacagtggacagcaagaaattcccagtaccatgcctaacaataggaagtactcagtaaatggtggttgcattttttgtctaattttacaaaggagaggaatatgtatttggaaaactccttactcttaataattagatttttttcaactgaatctgacataaatcatctttccgctattttctgagtccctataacctactttacattttcaggacattgttgcttatagggactcggcattgaagaagacaaaaatgtaacttactggccacacaataggaactaaagggtagccagtcacgactcccctgtctttacctttgtgtgtacatttgtgaagctaacctcagagttagcatttggggctggcttactttgtggcatttggatttgtgaatcttttcttctgtcctgttcacaggttctccttcttcatcaagaaaaagtggaaccagctgtccctccagcaaaaacagcagccctaatagcagcccacggactttggggaggagcaaagggaggctccggctgccccagattggcagcaaaaataaactgtcaagtagtaagaagaacttggatgccagcaaagagaatggggctgggcagatctgtgagctggctgacgccttgagccgagggcatatgcggtgggggcagccaaccagagctggtcactcctcaggaccacgaggtagctttggccaatggattcctttatgagcatgaagcatgtggcaatggctacagcaatggtcagcttggaaaccacagtgaagaagacagcactgatgaccaaagagaagacactcatattaagcctatttataatctatatgcaatttcagtaagtggtttattgtatggttttcggagagtggtctgtgttttgttcacttgttttcatgtattcatcagcaagtatttttcaggtcctgcttatttcctagcattgagcttagtgatagagaaagttaacatagaaatctgggcctgcccaggtgtggtggctcacacctgtaatcccagcactttagaaggctgaggcagaaggatcgcttgagcccaggagtttgagaccagcctgggccccatctctacaaataattttaaaatggagcgaggtatggtggcattgcctgtggtcccagctacttggaaggctgaggcagaaggatcacctgagcccaggaggccaagtctttagagagttgtgatcactcgactgcaccccagcctgggtgatagagcaagcccctgtctcaaaataataataataatagtaattacattataaaatgattgtttatccacacaagacttggagcttatgacttttgtattttgctttttgcttattttggttttagagaaagttagagggttctaaaatattttctcacctactgatcatttacatgatcactgttctcctgctcagatcctagtgctataccctggccatagtacatagtacagttaacaactaacatacatccactctcttatctcttacagtgccattcaggaattctgagtgggggccgttacgtcacttatgcgaaaaacccaaactgcaagtggtactgctacaatggcagcatctgtgaggtaaacattctcaatctttgaatgaaggttagaaacagaatatcaacagaactgggaaacatttgttgaaataatagactatctcttgaataggaaatagatatttctgttagaatcaatatatagatgctgtcagtattaaagaaacaaaagtgatatgcagagtagggaatgaaaacatgagtagtgaggaaaaataaagagttagttgactgggcgcagtggctcatgcctgtaatcccagcactttgggaggctgaggcaggcttaggaggtggatcacttgatgtcaggagttcaagaccagactggccaacatggtgaaaccccatctctgctaaaaatacaaaaattagttgggcatgttggcacatgcctgtaattccagctactcaggaggctgaggcaagagaatggcttgaacctgggaggtggaggttgcagtgagccaagactgcaccactgcactccagcctgggcaacagagcaagactccgtctcaaaaaaaaaaaaaaaaaaaaaggagttagttaatgcaaaaagctcctatcttctagactgttagaatttgatggggttgggccaagtgcagtggctcacgcctgtaatcccagcactttgggaggccaaggtgggcagatgatgaagtcaggagatcgagaccatcctggctaatatggtgaaagcccgtctctactaaaaatacaaaaaattagccaggcgtggtggcacatgcctatagtcccagctactcaggaggctgacgcaggagaatcacttgaacccaggaggcagaggttgcagtgagctgagatcgtgccagtgcacaccagcctggtgacagagcaagactccttctcaaaaaaataaataaatacaaaataaataaatagaatttgatggggttttaggtcattctcttttgacttgtctatggtcaaaatattttctccaaagcaaactttggaaataatggggctcattttaaaggggcaggtgtgagacagccaaactagtgagcttattggaagcaatcaggtttagtaattacagagggttggtcttccctttcctggcaaggatttagagccataatagtgatggctttttgttaaaggtttttcttgccctttcaggaacgtcaccctgatgaaattgacaccgactctgcctacattcttttctatgagcagcagaggatagactacgcacaatttctgccaaagattgatggcaaaaagatggcagacacaagcagtatggatgaagactttgagtctgattacaaaaagtactgtgtgttacagtaaagctaccactctggctgctagacagcttggttgggaggaagatgactccttgtagctgatacttggcaaaagtgtcactgagaggcaagctaaatgtagttattttatcctgttagaatacaaattctaattaaaatagttaactttaagagtagcagtaattttattttgaagtctcatgcaagttgtccgatagagaactttcaggcagatcccaccattagcctgtaaacaaaaggtttggcaccagccacctgggaccaaataagaattcaattgtgcttgtccagatatgaacaaatatgtagtgagtatagagtttatcaataatcataacaaatattaaagatttccttggagtcaaagtaaaaaacaaaaaattgtaatgttgtctagggatgacatgatatgctacctcctttttcctgaagttttattccattctgttgacaagatggtgaaagcaagatcatgaaggtgtgcaaatgattcttacggcatgggcgaggatttttcaatttattttttaaagtttccataccctttctttgtctttcttgctttttgtttttgccgttgtgtttaagtttgagacacaaccagtcattggtggcaggggcatagagtggtcagtctgaaagggaggctctcttaagagctatgtgccttctactcagagggagacccagtagaaagaaaaacatcctgggaaatccagctaccatggccctcccagtggaggcatcttacatttaggatacttcaggtatcctcagaaatgtattctgcacccccggccccgcccatgctgagggaaggggagcagttgccaatatttgcaccatcttcacatgcacatgttgcaacaagagcttctgggaaggtaagcggcatcggagctagatcacgtttcacaattagtggtggttcttttccatgtttattttgcactttaaaaaagagagaacacatgcaaatgaacttgcttgtgtgtatttgatggctccaagggctatgaattacaaacaaaacacatcccagacattaggagttcataagtatatttaatgaaattggtggttttaggaagtcaactttagttttgctttgtttgcatgtccactaatttttttattttgatattagtctttttaaaaaaattttacagtagtcattgaaagttatgtttctttgtttacttcattttttcctctaattattcaagactgggacaaaagtataaatattatttatttcaggtagaatttttttcatgtagttttttaatatatacttgaaggaaatgtttcaccttatttttggtctttgtttattcatttagaccctgcaagttgattctcattaattgtcagattccactacactttcttcctcataggtagtaattaccagtgtaactaagcatttgtgttctgatatctgaggccagtaactattaatatctagttctcagagcatttggaaaggttatcttaaatggctacctaaattgaaatccttttcagaaaaaatataattgcaaataggtaggagtggcctaaattatctaatgtaataaagtcagacaaaatgcatactttatagtttcaagattttcagtatataaaatctgtcctttcctacctggacatgtcccattaaaaagtggaagatcttaaataatttctttacagatgttttatttaagcaggtagcacaatctactaatgttgtttgatctgtgtttgttatactggttgtaattaatttttttaattcatgaactagcggaaaatttattaaattaactattaaccacattcaccttgtaaatgactgtataaaacttgttgacaatgcactgactttagaaagatgttaatgtgcataaatagagtgtaaataaaatagtgttgatgtactgaaatatgaactgtataaaaagtattggtaattgtatatggggtgtacctatttatctgtaactgttatccaaacaaattaaatactgtggatgcctctatgtactgtttttcctcatacaagtaaacacagaaagtcaaattcttcagcctccctctctgtgatcctgttttaattctcctacttgaataatttctttctgacttacagaggggatgcttcatctctgaggttggaaactctgtagagcaggattccccaactcctgggctacagaccagcaccgtccatggcctgttaggaaccgggctgcacagcagcaggtgagtggtgagctgtatttatagccgctcccccttgctcccattaccgcctgagctctgcctcctgttagatcagcagcggcatgccattctcgcaggagaacgaaccctattgtgaactgcgcatgctagcaatctaggttgtgccctccttatgagaatctaatgcctgatgatttgaggtggaacagttttatcctgaaaccattccccccagccccccagtccgtggaaaattgtcttccacagcaccagtcccgggggatggtgagcagagcggtgcaatggcctgacctaccaggtaaaggctccctcttgatcaggatttctcaacccggcactagtgacacttggggcaggatcattccttgttacggagactgtcctatgcagtgtgggatgttcagcagcacccccgacctctgcctacaagacgccaggaaggaccctctgtccaagtcgtgacaaagaaaaacatccccagaccctgccaaatgtaacctggggggcaaaaacacccacatttgagaaccatggttctaggatataggagtgtggacacaggcagctcaggtttacacaggctggatttgaggtgcctgggagacctgcttgctgagattcttttgagcagtcagacaggaggggctggagcccaggagaaaagtctgggcagctttgctgtcttcaggctcggtggctgttagaaggaatgtggcagaaaaaaagaaagcgatacccaaagagtctatttcatttaatttaattttttgagcaaggattatgctaaagtcaccaggcaagagaccaagatgagcccacctcacaaacccagaaacctcagatccaaggcagctgtataaggtacagatcgttccggactgtagaagagagggttaatccaacttcatcaggagagaaatgccattatccactgaactatttcttgactatctcctgtatgctggtcagtttcactcacattgtctcatttaatctttgacaaactaaataaaagtgtgaagtaaatattttcccctccctttttttttaagattagaaaacagaggctcaaaaggacccacgtactcagagtcaccctgtcaatgacagaggtggagtttgaacacaggctgtttaatgccaaagcccaatactggcttctggaagcttctagaaggaggggctggaacctcgcattgaagacgttgaggggcagtgttgcaggaaaatgggagagggaaacataccaggcaaagggaactgcttgggcatggcttcggcagagaacgaggtacagagatttgaggacaggatgatttcttggaacacagagcttggttcagtagaaagagcccaggaaagccaggatgtggccagttgaaagggaggggctttgagccattttgcatttgtggtgagccattttgcattttactctattggcatcaaggagacaagtaatgagaactctgacttgggaaaaatgttaaggatcaatttatctcaaatatcacatgtagctcttaagtctgagggccctctattcctcatcttacctaaaaggcacaaacacacctctccaagtcaggtatagggcccccaacaatagttgcctggtcaaaaaatgtatcctcagagttgactactactacagtaaatctggacacagtttctgaaaatttttgtttccctaaaagtttccatcaaactatattcactgacatgtaatgataatcatcaagactaaatcacatcccaggaggtatctgaatgcaaccgtgaggtgctccttcatgtccgaagatgcatttataacaatctggaaaacagtctagatcttcttggaagttagaccttcaactttatctgaattttgatgataaatgaagagctcttcttgtgcagtttctgaggttcttcaaaagagtgactgtttctctgtttccccagaaaaatactacaatatgtggtgtgtgtgtgtgtaggtgcctgtgcacatgtgtgggtgtgtgtgaatttgcctatatgtgtgtgtggatggagtaggtatacatgctgtgtgtgtgtggatgtgcattgtgagtgtgggtgggagatcgtgagtgcatgtgagtgtgtgtgtggatggagtaggtatacatgcctgtgaatgtgtgtgtggatgcggatgtgtgagtgtgggtgggagatcgtgagtgcatgtgagtgtgtgtgtggatggaataggtatacatgctgtgagtgtgtgtgtggatgcagatgtgtgagtgtgggtgggagtttgtgagtgcatctgagtgagtgtgtgtggcgagtgtatggaagtgggtagcccatgcatagagcatttcttagcctacttgacagcttaggagccacctcctccaggaagccttccttaatctgtccttcgtcctgcccctcgggacccaggtgacaccgagtatgcaattgctctatccctgcaggcctgcccctcactcatctcatccccaaacacagacacatgcaagaatgtgacactcccttcccaatacaacactaggacatttgattccctttgtattcccagtacctagtgcaatgtctggtacacggtaggtcatcagtaaataataaattgaattaaaccttgcaaaggcctccaaatatcagaattagtaagctctaaaggctttgtttattcctgcagattccttctcaggtttcagcaggtcatagagaacatctcttccaccagtcctagtctcaatgggacagtaaatgaaacagaaacaccaccatcccataccctccccttcagtccctctaaaatgagctgccgctgctgggagaaccagagctaagcttctgcagaggcctctgcccatgtcaccccagctccgcagtcctacctggcatgagtcttcctataactatacctaggcttcctgactgctctgtggggacacccagcctcattgcaccacaggatggggcagtcagagcagggcttcttacactttaacatgcatacgatcacctggttagcatgtggattctgatccagtaggtctgggatgaggcctgagattctgcacatctaacacgctcccaggtcctgcccatgttgctggcctgtggcccatccttccaccagaagcgtttagaaggctttagtctcctcgcagctgttcaagagaccggtgcggtgcaatcgggtgctgagtcatttggtcactgccgcttcttgttaagtcaacttctatcatttcacatgcatagaagttttgacaagcccttcagtcttttgtttctttctgtacgccagtaaaaaagaaagaacaagccaggcacggtggctcatgcctgtaatcccagcactttgggaggctgaggcaggcagaccacgaggtcaggagatcgagaccatcctggctaacacagtgaaaccctgtctctactaaaaagacaaaaaattagctggacgcacctgtagtcccagctacttgggagactgaggtgggagaatcgcttgaacccaggaggtggaggtgcagtgagccgagatcgtgccactgcactccagtctaggtgacagagcgagactccatctcaacaacaacaacaacaaaagacaaccaaaaccaaaaaaaaaccaaaaaacaaaaaaccaatcctatactcattgctcccagtctactaaagcagaaagaaaactggactgggcgttaggtgacatgaaccccagtcccagctctgcaggcctccaaggttctctggcctctgtttcctttcctataaagtggagtaacatagtggctggcctggttatttcaagaagagagtgtgagattgcagagagagcatgggctttctggtgtcagaacaagtttctaatgaggaaaaattacttgccttcttggagcctcactgtcttcatctgttaagttacagaggaaaagaaaatatgggatatgtaagtgtgcaatgcctgtcagctgccagaagtgcagcaaatgttaaatcccttctctgctcaaaaggctgtgatggaaattcaaaagccccttctcagtaaggccctctggacacccaatctgaaatgtcaggcccctcccccttttctctttattgcggatcactgtttaacatttgacttctttatctggcttatcgtctctccctcagcgaagggctatgccatgaggccgggaatttgtgtccggatggctcactaatgtatctgtggtgcctagaccagcaactgggacatgaatctttgtcgagtgcatggaccagcagtgctttagatattatgctattgcgttatcagaatccatttcttccacacctctgaagccagaataatgcacgtggagaggttttaaaggtgtggaaaagcagagccctagaagaaaacagcccaggctgagactttggggacaacaggagacagaagaatacttgatgatttcatagtgggaggcatggagaattaacgtagtcaagagctgcgaggcaataagaggagactcttgggcagccctcaaatagaatattattcctcctcctctctccaccttaccccaggtacaagagatgaatcctgttcccccataagccagctgattccatgacacagcagtccatgcagtccccaaaatttatcccaactgccttcctcatgctcagcttccaggctgctcatttccttggcttattcaccctgcatcagtttctagtgtggcccagtctccaggatcaacacagtcagtttgggattctctattcaagctctgatattgatttcatattcgccctctggcttcaggcactcacttgggtcaggggcaccctacagtctgagcccctttcggggagagagtggaacagaacatgggtttgaggtcaggtggctctgggttctgaccctgagtccttgaatcactaggttttgctatcttggtcaatttacctgacctcagctttcctatttgtgagatacaaagagaaatattatattgtaagcttgttgtcagcagtgattctcaaagttttgtctttgggacatcaatcctatgagatggaaaaggtttttattatcaagtgagtttggcaaatgctcaatatcatatcctcatcttgggaattctcaaataacaaaagaatgggttccactttcattaactcagtttttctaaacaacaaaattcctttttgcaaggaatacctgttagcatcctgcagaaccaatgttttgtgtaatccgtggtggggaaagctgcttgggaagattagaaatgctcaacaccaggccctctgctcggctcctggcacatgcatcgtggacaccaggaagcatgagtgcctgttgcatttcttcctaatgtcaggtatgtttggtcaaacctttcctgcttctgctacaaaaaaagcattttaggctgttgagacaagtagttttcccaaatatttttgttgagcccttctcgtgaaagggaaataacacaaactgaagttaatgacatctgtattttggagcctcgctctgtcgcccaggctggagtgcagtggcacgatctcggctcactgaaagcactgcctcccgggttcaagagattctcctgattcagcctcccaagtagctgagactgcaggcacgcatcaccatgcccagttaacttttatgttttcttagtagagatgggtttttatcatgttggccaggctggtcttgaacaccttacctgaagtgatccacccacctcggcctcccaaagtgcggggattacagtcatgagccaccatgcccagcccacatctgtacttttaaagctaaaatatgagcactcattagcctagctgtgaagaactgtcactcttggatttctgggaagtgactactcagacctgcaccaacaggagttggtgaagttgggtaacttgcccaatgtagcagagtctgagctctttctagtgacaacaccaccccacacacaaattagggtatgtcccatcatgtaggtccaggggatctgaataccttcatgtttcatccttctaaaaaaagtccagcaatacgtatcctaaaagccttacaaaatcttcccatttgggaatgccacttctgaaattactataaggaaaccatctaaaataaagacaaagagctgtgcataaaaatattcaggccaggtgccgtggctcacacttgtaattccagtgctttgggaggatgagggaagaagattgcttgagcccaggaatttgaggctacagtgagctatgatcacatgattgcattccagcccgggcaacagagtaagacttgtctattaaacaaacaaacaaacaaacaaaaatatattcatcacaacatgataatagacagaaccagaaacaacccaacatttggagaatagttaaatgtccaacagctagggaatgattaaatccattatgaggcttctctacattaaatatcttacagccatttataaccatgtttataaagaattttgaatgatatggaacatgcttatactatgaggttaaggaaataaaacaggctacaaaaataaaatatatgtactataataacagctatgttggtgcacagagagaaaaacatttaccaatatactaggagtggttatttctgagtggcgagatgatgagtgatttttcattctattctatatatttttctatattttcttttattctacatgtttttctgtatttccaagttttacacaatagtgatcaagaaaaggtaattatttatttaaaaagaaaaaaaaagacccatgagttatcagaacccagtagatctaaatggcactacaaacactattgtgttcagaggtgtctcccctatctaagcagtgccaggttagggaacgccgcccatcaacgctctaagcagtgccaggttagggaacgccacccatcaacgttctaagcagtgccaggttagggaatgccgcccatcaacgttctaagcagtgtcaggttagggaacgccgcccatcaacatttcccaaattccaggaaccatctgttccatagtgtcatatttgtgtagaacctacaccattacttaatattttcatagaaatcaactcagtttttaaaatttgattacctgtgttttaagaaaaattttaaatcactctaaatggaaaaataatgtcacttgccattaatggaaagtaatcacaaaaataaatgcaataaaacaaaacaatatcattaaattctacagtggtaaaccttctgagcttgagagctgcttttgctctgtttgataaaagcaggggctgagggagagtgttttcaggcaggagggacggatttacaagggtttgagagtaagcctagcctagcaacagacccctcaaaggattcgggaagattgaaagacaatgaaaaagattttctcactagagattttgatttgtttttaatgatttgcccacctaccacccaaactgcctaggacacgacagctggggaaagtgccattcaacaaagatttgaccccagcccatgagttgctgacagtggaagtcacataagttagataagtgtaccggactgagttcctccaggacaggaactatttcttcttaagcttggtagtctcagcaccccggacagtgcctggcacatggacttgtttgttgagtgagtgaagaaatgaatgaatactgggttgtgacagccttttccccaaagcagggcaggcgccctgagtcgctcacatcacccttggctttcagtcctcagagtacagcaagtggaagttcaccaacagccccacgttcctggagttgctggaggagttcccatccctgcaggtgtctgctggcttcctgctctccctgctccccattctgaagcccaggttttactccatcagctcctcccaggatcacacgcccacagcgatccacctgactgtggccgtgctcatgtaccacactcgaggtgagcctggggcagaggctgtggagcagtcacgctctgccccttcagttccctcatcagttcaaggagggagggaacacctacagcccagagttgctaatggtaataggaggcatgtgggagacagctctatgaaccaggcagtaaaccaagccttctgtatgtatatgatcagttaccatgtagggtaggtactgtgtgcattttacaggtggcacagaaagtcacactgtgagtaagtggagagctgagatttggacctgggtggtctaactgctgagtccaagtcttccaccactccactgtcccactactcttgagacaatttaatgagatcagacttggagagcacccaacccttggtgagagcccagtggtccttagtcttcctgattgtgcagcctgaacgcaggggagattctgcattggctgttcactcactcactgagctcattcagtgacggtttatttcacatctctccgtgctcagcactggggcaggtgtggaaatacaacagacatcagccctgccctcagggagcatctagaggcagcagtggagagatgagtgtagaaataattagatgattctcattgtccagaagccaagaaggaaaggtcagcatcactgaggacagtgaagagggggtgacgctgccatagagtggtaggccaacatctctttcaggtggtcttggctccaccactggcctctgccccccgccctgccctctgtaactgagtgttgcttggtttggcaaagctgggagctgcctatacttctgagccctctgtctaggaaacaaaaacacagtttctaaaaactggccagagactctgtttgtcctgctagagaacacccacccagaccaggagaggagaggcagacacgtcctgtgagagcaaaatttaatcccgaggaaaaccagggggacctctgcagtttggttggaggcctccagcaagtgctgggccattgtaaaagaaatgcaacccagagaaacctcctgggtttctaccagcccaggaggggcaactgaggaggaaagcgaggtgccagagcaggctgaaacgcgcggagctcatccgccacccagggttgcaaccagcaagggccacgctcatgagcacgcacagcagtagccaccccgaggggccacttcctgctgctgtcagtggagctcagtggtgagctgggagtgttcctggagaaactctttggaaggagcactggagtaggagtcagggaagctgagctgtcctgatttcaccatgacctgagtgaccttgtccaagtcactcttcctctccgggactcactttctgcgttgaagatggagcaactcgcaacctctctaagtccctttcaaccttcctcagctctgggctcacagcgggtggatctcagaaccaggaggacaaagagctgctcattgagtcctgagagtgcctgagtgggggcgtccaaggaggccgtggtgtgggcggagcagctggtacagtttgcgcatgggcagtggggggacgttggtcactttgtggtatcgttgcagatggccagggtcccctgcaccacggcgtctgcggcacatggctcaacaactgaagccccaagaccaagtgtcctgctttgtgcggaagtaagcaccccttccactctgtcccctgtgggaccgccgacccctggaggttcggggaggaaagggagggatctggggtttaggtgccgctcggggctccttggcccacaaagaagacactggggtcacactggtgtggctgtctctagcagagacagcgatgacagcagagctggaagggcccagagtccagtgagcttggccctttttcagaaggacctgggggaggtgctggtggctggacagaagtgaagccgcctgcagggcgtgggaaatcaaataggagctgctctccacccgctacgaccgctccccacaggcccagctccccagccgtcctgtgtgtgcgtgggcccggggtgtctgaggactggccccctcttctcctgtcctcttcagcgccagcggcttccggctccccgaggacccctcccatcctcgtgtcctcatcgggcctggcacaggcatccctcccttcctcagtttctggcagcagcggctccatgactcccagcaaaagggtgtggctggaggcttcccaggtgggagggtaccagaggccagcgcctgcctaggagcagaaccgtagccccacaaacggttcctggacctctctggagggaaggcctcccaagtttgtctccctgtgtggggcctatgtgggtgagaacggccgccttcctgtctccggcattggaaccggggctccctctctcgggagtggaggtaacgggaaagtccctgcttttgacctccgatgggctgagggaatcctgcatctgcactttcagttgtgtgactatgtatgagtgattggaatgccctgggcctcagtttcttcatctgtaaagtggggataatgctgttaactagctaggatacttgtgggagtgaagtgagaattccagttcggctttgagccatagcgccctgctggccaacatggtaacaacagcccgggactcctgcaggagtgcagggaggccgcatgaccccggtgttcgagtgccgcagcccaaatgaggaccacatctaccaggaggagatgctggagatggctcggaagggggtgctgcctgcggtgcccacagcctattcctgcctgcctggcaagcccaaggtaaatgcagcctcaaagcaggtgaagcagtacacaacgcaggctccagtgtgagcccggggtccccacaggcccctcgcctccctgagcctgcagctcctgagctctaaaatgcaggtaattcacaaccatcagagtggggctgtgaagactgttacgccctctcttccaagagaagtgacaggaccggagaggttcaggactaacctaggtcacaggcgggttgagcccagagcccagcctgctgaaggtcatccgcaggcccccgggacaggtggctcccctgggagaggtggtccaggccggctacgttcaaacccagcaaggctggagggcggccgatgcttccaccatggccctcagacgggctcacctgcccccagggccgcgttgccctctgagcctgaggtgtcagaatagactctcggctctcacacatttgttgccatcagggcacctctcgggcccagtgctctgtgcccagtgctggggccactgggcatgctgtgtggagcaggagcagagagtccccgactgactcctggaccttctaactgggaagcccgggatccgtaccctgcagggacccgatggacagtctgcattgagaggatacttttcaggggtgtaggcagagccctgggcagggggactgccttcattgatgcctctttgaagcatggcaaattcagagacagtctgggagccccactggacagtcagccccttgagggcaggcctgtgtccagcatttatgtctctactcccagcccagcccccagagcatctgtgctcctcctcttcctgagcctggacctgtgcaaggtcgtggctgggaggggactcactccacagcccttagtgccctctccccaactccctgaggccagcagtcctgcctgcaatccttgtctccagtggccgggaactggacccaccgtttcctctggttttaggtctgtgttcaggacatcctgcagcagcagctggccagcgaggtgctccgtgtgctccacaaggagccgggccacctctatgtttgcagggctgtgtgcatggcctgggatgtggcccacaccctagcagctggtggctgcctagctgaacttgaatgaggagcaggtcgaggactatttctttcagctcaaggtgtaatagtgggtgtatgggctgagggtcctggccaagggcacaggctattggagccaggaccaggggtggcaggtagacccaggggagtcaggcccagaaaagttctggaccccaagggaatcttagcagtggctgggatctgagctgggtgggctgtcagaaggccccactgcacatcctggactggttggcagctttgagaagtcaggtgaatgtgttccatttttccatctgtggaatgggagcaagagagtctacttgccctctccccaaacccccctttcagaaagtatctgtgtggccaaagcaaggctgtgaacacaggggagagcaaggctgccccccgtcagcctcgtgtgaacctcacacttcttatttacacacaggctggcgtctgctcaccctcatcctcccagcaggaagggcttgcattttattgatgaaaataatagtgatatttatcaagggcttacactgggccaagtgcttgccaaggattctcatgtgacatttctttcagtcctgccgaggactttatgagggaagcaccctgttttacagagggaagggggcctatggggtctacagcagtgagagcctagagttcagtctgcgtctctctgattccaaagcctgtgattgtgacttccatactctccctaagacacattcatacattcaactgaatatttattgagcacctactgtgtgctagggatagagcagtaaatgaatcaggcaaaaattatttacattccactggggctgacaaacccaaacaaggaagaggtgtagtgcttcggagaaaaacagcaggaaatagcccaggggacactggggagtgtaattttaaatagggtggccagggaaggcggagctggaaggcggcgtctgagaataaacctgagatggtgaggaggagccccgtggatactgaaggaaacactctgggctgttctggagagggcagcagatacaaaggcccgggggtgggagttaagctggcgtgtttgaagaacagtgaggagataacaggcatttccccaaatgtgttaaatgagtcggtagatgtttggcatccaaaaggttacaaggtcgaatagcctaggacatgcttagttaagccaaggcaagcacgttgctttactacaagacttctgggggccttcaacgtgctgctgtgcatcgggacccttcaaggctgggaggaaagaaaggatgtagcatttcccaaatgtgttaatctgaaagctcacacttcctggagcatcttgggtgggggatgagcacagggcaggaaatgggaatgccaagtaaagctttggaaatggttagagggcctgctccagagcaggtgctgagcgggtttagggtctaaaccagattcaagcgcaatcaaagtataacagttgggaagacagatggctcatgaaggtccatgtgataaggaagctgggcaaccccaggggctcattccagcctggacttgacacattggtctctgtttttacctaaaagagccagaagcacttccatgacgatatctttggtgctgtatttccctacgaggcaaagaaggacagggcggcggtgcagcccagcagcctggagatgtcagcactctgagggcccacaggaggggttaaagctgccagcacagaacttaacgatggagccagctctgcattatccgaggtcacagggcctggggagatggaggaaagtgatatcccccagcctcacgtcttatttctcacctcgttccccatcaagccctttacttgacctcctaccaagtagcaccctggattgatcggagcctcctctctcaagctggggcctccctggtcccttggagacgaaatcttcaatgccaggcctggcaagtgggtgaaagatggaacccgctgctgagtgcaccacttcaagtgaccaccaggaagtgccgtcacaccactgtgtatttaactgccatgggtacaattatttatgcctctgtttaaaaaacgaacaccctagtctgttcctaatggccccttgggtcttctctgtatgattccctgatggagatatttacatgagttgaattttactttaatcacactgtgtgtgtgtttgttgggggagctggtgggggatgttttatagggaatgtggccctcagttatagagtggggagctggtgggtgtcgcagcctggacagatgccccacagagggacaccccaggcaggccacggctcctctgaaatggctgccaggtgtgacagcagcagatggagcttcgtgctggtccaaagacctgcggtagggtggacggcacaggcctgcctcccacacaaaggatctgacgcggggtctggcaagagtgggattctcatatgaggccagagcttcagggaaggtcttgagcttcttcttggacactgtcttagaaaggttttgctctggggccacctgtctcacgtgagtttggccagtacagatgtggcctctgggaacacagggtgtcaaagcgagtgtgggccacagcatcctcgcccaagggactgaagaccctcctgggtttggagacagccagggaaggctttttaagagactagacccatttccttctcctggtcagaaccaaggaaggagctcagtggcggcctctggggtcctggcaacacgtggctcccagctggggtttggcctgtgcctcctgggccaggcccaggaccctccccctcccctcctccttccagcagcagcgtctcaggtggcaggagaaggtgcagtgccaacttcaggctccagacgtgccctgccctgcgtggcagccgtgcatctcagcaacacggccaggagtccgctccggaccagggcttcccagctttcatgtgcgggcctcatctggggtcccgtgaagacagagactctgatctcgcaggtggggtggggtgcgggatgctgcgtttccaacaagctctcagtcgctgctgccgccgccactctgaggactacacgggggcctgaggaactggattcttgctgggccaagcaggatgtgttggcatcacgttgacgcggagctgggctgtctggcggtggctcagtggctggcagaaccccacacatggacactgagccacttttctcatgcgagtcctaaccctattgccagggagacccacaatggaacacacacccatacggtgcttcgggtgggcctctcctgacaccccttccccaagccacctcctcccactgggatgccaggtccgaggagccagctctggccctgctgtggccctcacaggctctgccccagcccgcctcccatctcggaggcatggggctgtttcctggggtcccccattaccacctttcctgtgtccgagactcctgcccaaaagactagagccccagcctgctttctccaacaccctcatgggacggtggctctcttctcatagctcccctagacactggcccagtgggggctctgtgtgggggcttcaaccccacatttcccttccacactgccctggtggagtcatccctgagacctgataattctagaccctgtggccaccagaggagcccatgcattggcttccttttttttttttttttttttttgacagagccttgctctgtcacccaggctggagtgcagtggtgcagtctcggctcactgcaacctctgcctcccgggttaaagtgattcttgtgtctcagcctcccaagtaactgggactacagatacccaccgccaccaccaccatgcccagctcgtttttcgtttttttgtttgtttgtttgtttttgagatagagtttcactcttgttgcccaggctggagttcaatggcgcaatcgcggctcactgcaacctccacctcccaggttcaagccattctcctgcctcagcctcccaggtagacggaattacaggtgtgcaccaccacgcctggctaattttgtatttttagtagagatggggtttcttcatgttggacaggcgagtcatgagctcccaacctcaggtgatccacctgcgtcagcctccaaagtgctgggattacaggcgtgagccagcatacccggccattaatccttttttaattaggaggtgtgaggtcaggaccccctgcccaaagggagtccatgctctcccatcccactcctctcagcagcccctccgcctgattccacagattccaaaatgtctccaaatgaattaaagaagccacagtcaacccacatgaatgtgccaacaagcattttcatttctttattttaaggacactgggaaaggagccagtcccctgaagagaacactctggtcagttggtggaggccagtgggaagccatcagacctgctttccaggaggggtgaagggttggtgcagggtgcaaggtgagagtgaggttaaaggtcagagaggaggggctgaggaggccatctcccaccaggagcagacagctggtggcttgagactggggtggagctgcgtgggggatgggaggggactgagcatggggcttcatcttcactgcccgctcctcccctctccctggctgtgcccgccttctgggattgtaggattccagcagctggcgccccaggtgctgctgcggctgaggaagacaatcccagtcagctgccttctcaattccagggtggctgtagccagaagcaggaccagataaggacatggcctctgcattaaagcccagatcccaggcacggttggaaaggctgggcctgggaagtggggatgatgagaggaccccgactgccccacaccccagcccccggccccagggccagggagccgcctatgtctgcacgtgggtcagctggatgtcgccacccacttccagtttgttgatggtgggcaggttcctcaggcgatggtagtattcaaacacgtgctgaccatccacggccaccttgaggcagtgagcttcacacaagatccacacctgtgcagagattatgccgtttgcactacacttgggaagtcctccaccctcactgcagcctcctctctccctccctccctccctcctcagttgttaataagcccctcacctgcactctatccccactgagcgaccggctcttcactaaacaggctgtgcgtgctccttcccctgtactgttccctggcctagaatactgttcccacgacatcagggacaggagcactggcctgtgccatctgtatccctcggacccagcacacaggagtgctctgggcctgggctcctgcagcatcagcctcctaacttgtcttttccaccccaatgccttctccatgaggcagtcagggtacaaatgttaaaacctcctgccctttgcaatagctgacactcttaacacacatgccatgtgtaaggcactgtcctaagcgtgctacagatactgcctcattccattcttacagctctaggagattcatatgattattagctccattttgtagatgaggaaactgaagcacagagtagctaagtcacttgcccgaggtcacacagctgtccacaaatcaaagaatgttgctccctggctccatggctgcaaagccctacatcagtcattttcaactctgattgcagagtgtaatcacttcaggcatattttaaaaatacaaatgcccaggctgaccgcctcattggcctgggctggggtcccagcacctatatgttctttgtaagctctctgggtgatttgaatgtgtagtcagggcggagcacgcctgctgctgttcctggagaggccacacccgcacctctgcatgttggccctagctgcccctcccaggctcgctctatctcatcgctctgttttgctttctgcgtggcactgttgttatctgcaacaatctgttcatgctttagtttccttgttccttcccccagctaaattgtaaactctctggaggaaggaccctatgtgtctgcttcatgactgcgctcccagcacgtggagtgcttcctgcacaaagcgggcgacagtgaaatcgttgaatgagtcagtgaagaaatgaataacacctccttcttgggtctgatttgacacttactgactgtgtgaccgcaagcaagtaacctgcacttgtgagtttctttcctcatctaaaaaagcagatcccaacgcttccttcatgcaggacagtaataattattaataataatgacaataattttttggccaccttttcttctgggccctcatcccagaggcatcagcttccatcctgttcaaggtgccccagacctcctttaccccctccccgtgtacccataggagcctcctcaagctccaggctgcggcgccttaccgagaagctctggcctcggacgaagggcatttttcggggcagacttcgctcctcagacccccaagagttgttgatctgggtgttacggaccacagcattctcatcaaaacgggggttcatgtggaaggcgatgtggctcccagagcacaggttgatgtggaacctgcggtgggcagcctacctggacctttgtccactgagttctgagccccatttcctccccatcatcgccagcctgccaaaagccaggggaatggctggaattaccttgaagggctctctcttcccagaggtcactggagcctttggcttacctctgagcactgggcaggacagtgcctgacaggatgatggacttggatgggtacagccctcccggaatggtggtgatgaaaggcatcggctgtcagaaggacggggacaggtcagccagtggcagccagggcagccgccacatggaaggggaagattgtaccatttcccatgaatttaggctgtcagctgagaagaagcccacgatatctttacttggttccataaaagccaaaggaaaactttccggtgctcctcaaattaatgggcttagattagtgtcatgaaaggaaatttggccaaacacagaaagaaagactcgtggggtgaaaagggagggccatgcaatgtgctcacgttgacacgacagttttaaggttgaaagctcctctccacagtcttctaattcactgggacgctttgaagcccttcagcttaccattttgaaagcccttcgcttttcatttttcaaggccagcggatccccccgtagcggcccttcatccctagcctgcccaccacaaacagaacctctgccctccctgagaaaccacttacataggcagggtgggggtacatcataggtgggatggcgggagtctgctgaaaagaaaccaggaaattcaatgggagagcgcatgtgtgcgcgagcactcacccacgcgcacccacgcattctagagggggctccactgtgaggctgacctcatgagcctttggcccttggactctcccgtaaacctccgttttcatgttagccttcctggaacttcctgccgtgttcccagaccccaccatggtcacctgcccctcagcccctccgcaggcagccccactaatgctaagttcccggcctgatttgcaccagcaggagaagagcttaagcctgtgatctgtagtgacatcccggggacccaggaggcagggccaggaacctcacatctgggtgctggggccactgcactccccacttggtgacagaaggaccagtttccctcccagtctctagggaacctgcctcttccaccactggataaatccagaatctctgctgtcccaaggatagttttaaccacatgtcacctgagccaaggactcagccccagatgtccccaccctccttgctaaaccgctttcttcccaactctagggctctagggagtttagttcttggggaaggagggcactgtgcagctgtgaactgatcagaacttgaagacttacagagaacatctgtccagaggcgctctgcaccgtgtggatgactgtctgggtctggaagaaagaaaccaggtctcacccaggctctcctgagtaaagaccaccccagctcccaccagagggtgccacacggcaggcaccctccaggggcataaccagcccagtggccccacagaccccacggagggtgggtccaggggacgagggagaggcaaaggttagaaccctggagaagacagatggggacgctggtggctctggcccatctttcctctcggggaaacgtctctcagcctagcctccctttgcaggtgagagaagtgaacgtggggcatggtcttccgtggctgcccatggagtggcaactcaggttgttccatcacggccagccaaccacattcacccaccaacctcgccaggccgggtagatggtcaagggcctggcctctgccctccccactcccgatgggagaggcccaatgcctggccctgcatcctccattagcccagaagaagagccaaaatcaagaggatccaaaaagaaagcaagagacttacaatgggagctgggttggcaggccgcacgctgggaggctggaggggtgaggagagtcagaacggtggttattgcgggcaccacagaacggggagagacgatggcagaactccagggaggctcttgtgctcagaaatgcctccccagacacacccacctccctcttgctcccaagcaagccttcctgagcccgtggcacccagatttttaccctcaggtgcacaaggctttggggttgaggggtagggtatccccattggttcctctcgagagagaggaggctgggtttgatagagacctcattgctgtctgtagctcccacagccaagagcattacttccggtgccatatttcacccgtaagctgagaagtggtatttgttgaaggcctattgtgggccgagtcctgggcttcagtgctttccaaagagggaagcagcctcagctcctgtgtccctggtgaggcaatgaggctcagaaagattaagcaacttgcccaagcttgcccgggtggaagggatcaaatccaaaatggcagccaattctgtctgactgcatccagcacactttctgtcatccctagggccagggccagcgccagggccagggccaaagtttggctgccctgcgaatgttccctggggctccaccagtcctgaagtcagcgtggcaggaggcaggtgcactgtctgtaccatcatgggccataaaaaggctacatagacaaagcgcccctcctcccagtccccactgcttgagtggccagaggaagggctgcccacctccttgtcgtggatcctgccccacccagtagactgttcttgccctggctggtatcccattctccctggctgcgaaaaccacattccacattcatccattcttcgagtccctagtgagtgccaggcactgtgcaaatgaacgacccacagtcccagccctctggggcctcatgggcatagggagatgggggtggagtgacagggacagacacgcaaacagttacaatggggtgctgtgaactggcatggcacagatatgtacagactccgtgggggcatggggggagcatccaacaatattctgggcagggaggactcccagaggagcgacactttggcagagcatggaagggcgattaggcgtgtgctgagggcaggctggcagagggtgcttccgggaccagggacagcatatgcaaaagcatggtggcccgagagggccttgagtgagccgtggaggttgcatgagcttcgtgggttgggggtgaggcaaggaggtggactggggccagactggggaggaattcgtatgccctgctggggaatttgggctttgtttgaagggctggggacttttaagatttttaagcagggagagagtgtgatcagatttgcttataagaaggtcactgtggcagcggttgggtgtggggggtggggaactggacccctgtagtcatggtgaggaatcccagaggcctgggccacatcggtggctttgggagggagatatgttggtgccttggagagacataaagaaagggtagtgaagaatccagggcaacacccaggtccccggctctgggtgcccagcagacagagacagggaactcttgagtgggcaagatgtggcccataggccctggtggcctgctggctggggccagcctctcaaaccctcggtccttcctgctgtctgctcagccacccagggcctctgtgttgaactcactttttgtctgcgccccctgggcctgggtgggaaacagacaggctgggagaacggcaccgtggagaaggcaggctgaacggggactgtgcggggattctgttaaaacaaaaggcaccggccggtgaggagaagcattaatagagccaaggagaagccgaaaggcagatgcaggggcaggaggcagagaacaggcaggcagggggatgcagcaagggggttagggccacacggaggcgagagcggaaagggccaggcttcggtgagcagcgcagggggacagtctccctccagctcttccctccccttccacccgcaggggagagagtcagggaaggagggaatgagagatgaggaccaaagggtgaggagcccagatttgctgagggcctactgtgcacttcgctcatctcagggagctccctcgaatgccaaaagggtaacagcagctcccatccagctgccggtgccctgtgggaatgtgggcccagcataccctaatcttcccatttttcacgtggtgttggtatctcctgaccttctttagttttatttattttattttattattcaaacaaaaagattttagagatggggtcttgctatgttgctcaggcagaactctaattcctgggctcaagcgattctcctgcctcagcctcttgagtaaccaggattgcagacctccaccaccatacctgggtctcctgaccttttagatgttggcaacgcattcaaagtttttaaaacacagaggtcacacagaccctggtgtgggcccaggggcgccattgtgtgacctctgatatctgtctcctcaatgaatcacacaaccacccatgggggccaggcaatgaccatgctcattctacagatgacgaaactgaggctgagagaggcaaagttgcttgtctaagatcccacagatgacgaatggcagagctgggaatttgaactggattcagtttggttcttgagcctgggctctttctagaacaatatgccctccttaccaggatggaaattgacggatgaagagaaaggggcagctgaggagtctgggagaccaaggcaggtgttccagacagagacagtgacacagaaggaggggcagagtgacagaggagaaggggcgggcaggtactgggacagggaagcagaggttgtccccagagtgacctgggtaggagattggcttgggtccccccagctgggccctgcatcccagcccctgggaccggtgccaggtggacagtctgacctggaagctgatgtaggacagctgcacagagccattgacggagatggtgtccacacggtggaagggcacgcggtggaagtactgcacgaagaggctcccgttcaccatcacctgccagaggagagcacgtatttcgggggaggtgccccaggccgggatggggaccacccctgagctcctggtccctccttctaaaaaatgaagacctgagtctggtcttcagtgtggggccagttacagggacgtgtgtgtggcccgaagtgcatcaaccggagtctctactgggctccagtcgggctttccattcttctggttgtttccttcccctttcttctcactcctcgatttccagcctggttaggaggccatattgttccagaaagagcccatgctcaggaaccaaactgaatttcctggggtttcatttatttattatttttccttcaactttttttttttttttttgagatagagtgtcactctgtcagccaggctgcagtgcagtggttcaagcgattctcctgcctcagcctcccgagtagctgggattacaggcatccaccaccacaccaagctaatgtttgtatttttagtagagacgggatttcaccatgttggccaggcaggtcttgaactcctgacctcaagccatctgtcctcctcaccctcccaaagtgcttggattataagggtgagccgccgtgcccagccccttcaacttttatttcaagttccagggtatgagtataggatctgcaggtttgttaactaggtaaatgtgtgccacggtgttttgctgcacagatcaacccttcaccttggtatcaagcccagcatccattagctaatcttcctgatgctctccgtccccgaccaggccccagtgtgtgttgtttccccacttgtgtccatgtgttctcatcgttcagctcctacttataagtgagaacttgcggtgtttggttttctgctcctgcaacggcttccagctccatccatgttcctgtaaaggacatgatctcattcctttttaggactgcaggggtattatttaaatatgcataaaatgctcacggggagcagaggagaggtgacatcgggttgcatactgaatggatgggaacatccttatctcagataagcatattcagactgagttacccaccggcttctcaagcccagagacctactgtgcttgcaaaggtaatttgcaatgtgcttacagaactataaccgtaatagactctggataaaggctggaacaatgtcgctgaaaaataaatgttaccagggacctggagaggaggtatggtgatagcagaggaatggaatgagcttggaattcaaagacacacaacacctaacagcaacgtgatgactcctctagttcttattttcagagtaaaagaagcaggaggtgcacctgtagattcaggtgaaggtgcgtaaggagactacacagccatgggtaacacccttacaaggaaatggtcatgttatctgtatggtggtgtcactctggctgaatgtcaattaaagtggttacttaaaaggccattcacattcacctgatagggctgggagtcccgtgggcgagaggtggggaggggattcctgcttaccttgaaatctgagctctgcaccaggaagcagaggtcaaagggcatccccttctggaagggcatgtgcatcttcctctcctcgggcccccatcttcctttctgcctcgtgttgcacaccacataccctccgtcttcaaaccgagggttgaagtggaaggcaatgtcgtttccactgaagcccgtctgaaagtccacagcaaacctaggcccaggaaaagcaaatagtcttctgtggcatggattattgccagtgacaggcacaggagggcctcggtgcctctgccctgtgtttgtctgggatcttgcatacaacctgcgtggcagagactgcttggttggcatcgtttttgtttctctaatttggatccaatgtgtttttgtgcgattattgcattttgcctttacagcacgattttctaaacataagtagaaaatggctaagggaaagtgctggcattagcaaacaagaagcataggtcctggaaagtgattaccagttggtaacaaagatggaagttgttaagcacacctagaagagagaggcttctgtgccagtggacacttgttggaggccagcacatgcctgattaagtgcgaaagaagagaacaaatgtaaagagcatgtgaaatcggggccgggcgcagtgcctcacgcctgtaatcacagcactttgggacgccaaggtgggtggatcacttgagcccaggagttgaagaccagcctgagcaacagagcgagatctcatctctacttaaaaaacaaaaagatatatatatatatttaattagctagacatcatgatgcatgtctatagtcccagctgctctgggggatgagatgggaggatcccttgagcccaggaagtcgaggctgcagtgagctatgatcgtaccactgcactccagcctgggtgaaagaaaaaagtccctgtctctaaagaaaaaaataaattaattaaatgaataaatggagaagattgcatttgaaatatcactgcatgtatttttttcctttggagaccttcagcttcattcctgtggccctttggaaattcctgccccaaggaagggagagacagaaagctcctgagaggagagggccctctgaggtaggatctgtctctgtgcaacaggatgggagtgggaagccctcctggtgctgggaggtgggggaaacagagggagagggaaagaggaaggggtggaagatcagaggcatggttctgattcccccggttggaggattcagggggatcagggcctccctgcccttggcatctcctgggggcactgcaggctctcagagaagtccgacagcaggatagcaatggcggaggaggtcatcaagaatctaggtggcggagctgaggttgagctggcatctacgaggcccagagggtcttaagagaggtccactgggactgaggcagagaggcttccgagagagagccatgagtccagaggctcttctgtgggccccgcagacttcagcaggcagccacccgtggtccctcactaaaccaggagagagctgcacacctctgtgccacccagtcaggatgcctcggcaggggtcagccaggcctgcgtgagggtcgggggccctcccagccactgacaagccacgtgagctcctctctgttcccagacagcccaccttgggagggaggaaggggtgggaaacagccctgatacaatgttagtattttgaatggacttagtagtttccagaaaaggccttgaaaccgaaagagaccaaattacttcggatgtcaattttcagtattttcatgtcagcagaaggagagcttcagagtggatgaaagcagttatgggaaacggaggaagtttgatttttgcaactctcagtcacagtgtgcaaggttcagcccagaacataatcatccaactctgaccatcccactccttccttagaccttcagctcccagggccccattcatcctggagtccaggttaatggcatccctgggtgcaggttgtgcctgtggagtgctgtcctgtggcatgggttaaggatgcattgggtctcccctgcgccaggcacgtgagcttggatgttgttgtttgaactaaccgaggctcacaggcacagtggctttactaagggacgaggctggagtgaaacgtttccatccatatacacacacctggttccactggagctgagaacggccccattgacagtgatctgaaatccgtcctggagacccccttggatagtcccagaaaaggggacggcctgcagggagaagacatggggcctcagtcaggtggccggcctcctgtttgctccccttcggggctagtcagtggctggcctgggtgtgaccgcaccatgcgaggggctagggtgcagctgtgaccaggacagaaggagtctcagccccacgggtcttagggtcctgtgtggaggcagacacaaatccaattagttactcagacagtctaagcttgtgataaggagaatcctggccctgagaggacgcgacagggagctgagcttgtgtgagagtctgagaggcagcggaggccacaccaggaacgctccaggcggaaggccttccttccaggcagggaagtagcaggcagacgccctgggctggtaaggaactaggtagcaatggggctgctggaccccatgccaagctcccagcaaagtgcccagcgccctggctggggactcaggaggcccaagggaacaaagggacccatcaagggtctgcaggttccaccgagagggtcaccagagagtgtcaagaagaaggcatgcacctctccccaccaccaccatataacaatggccaccatgacctttgccctcctgaccaccttcagcagagcctcttcccagatgccctccgcagccccgagccccagcgtagtttccccacccatcccaggccccgtgggcaagcactttgtcaaattctctcttccgcgcctctttaaaggagctatgggccatggtgaggcatgcatcgttttggagtcaggcggactccaggtctgaatcctaactctgctgctcctgacctgagtggccttgggaagcctatttcacctctctttgcctcagtttcctcatctgtaaaataggaaggtgtttctcctactgcatatgattgatgattttgtgagaaaaagcctgtggtagaagagactggcacagaggagacgcttcaccactgtcacccacccccaccttggtctctctgagcaaaattcacaaactggtacttccaatcttcaaagtttattccgaaatgcctcatatccggtgtggttctataacctgcattaaagcacagttctatctcatggctgattttcacattcttcaagtttttaatgtcttctctaatatctcctttaggtcaatttcctacacaaattaaatgcctaaagaagccaggcaggtgatgtgtatgagtcagatggccaggtagggagtggtggggactgtggcaaagtagacgtcacacgcctcatctaaaaagtcaacatcttctcagcactaaccaatgattaccatctgggcttagtattggcagaacttccaaatttttaagatgagacagaaacctgaatttttttttttttttttttttgtaaaactttctaatttcttgggggaaatcttttgtcaaaaaggattatgtaaaagttcctgactgggcacagtggctcacatctataatcccagcattttgggaggctgaggtaaaacaatcacttgagcccaggagttttaggccagcctgggcaacatagtgggacccccatctctacaaaaaataaaaaaattggccagatgtggtggtgcacacctttaaccccagttacttgggaggctgaggtgggaggatcacttgagcctgggaggtcgaggctgtagtgagccacgattgcaccactgcactccagcctgggcaacaaagcgagaccctgtctcaaatgaaactccccaaattcccacattgtagagatacacaatgaaatatttacaatggaatgaaatctctggatttgcttccgcatatctgaaggtgggaagagaagcaagcgagggagggtacaggatgaagcaagataggcctgagttgatcattgttggagcagagtgatgggtgtgtgttgttgatggtacaattctctctgcatgtttgaatttcctataataacaagttaaagtaaacactgtgtaggccaaacagaaaacacccactagccaaattcagcctactggtcactgctttctggtctgtattgttgagttatgtgaccacacagcaccctgggaaacccatcctagctcagtgtacacacctggcaccgtgaaagccccaggcaatctgagatctgatccagatagtctctgctccccatggatttgagggggttgtcttttcttgcccctcaggtcaggtctgaactctgccattaaatactttggtgacctcaagcaaatcacagcttctctgtgtctctgacttctctttcttgtccctgtctacaccagcggtgtgggggaaggagagtcagcctgatccagttatgggccagcatgggctaggattgggaagcctgttgtccctgaaacacgtctgtggaagatttttccccttgcctgtttgtggcagcctgtgattccctccagagcctttcattctatcatgagagacaacgctgaaaatacacaccctcctgggaagcatgcggcctccactcaagcgtattcacaccacagcacctagaattgaaggcagagagtgatggacatgggctcgcaagtccacacaaggcttaactaaggaagccaggagggagaaagaccaagtacaggtcatgggggcaggacagggcaggctaatctccaaggcaacaagttccccaaaaaagttctgtgaggtttcaaaatgtcttaaatggcacccccaatttctgaaaaacaagattattttattatttattttattttattttattttgagatgggttctcactctgttgcccaggctggagtgcagtgaggagtgtgatcatggatcactgcagcctccacctcctgtgctcaagtaatcctcccacctcagcctcccgagcagctgagaccaaataagtgcaggccaccaagccataccccactaattttcaaatttttttgaaaagaccaggtctcgatatgttgccagggctggtcttgaacacctgggctcaagtgatccttctgtcttggcctcccaaagggccgggatttcagacatgaaccactatgcctgtcctgaaaaatgagattttaaattgaatatcatccaacaaacaaggttattcattgcagcattataacacaaaggattataaagcaaagcattggaaggagcctaaaagtcttccaacagggaaaaggtgaaataaattagggtatttccatataatagaataagttctgtgtagctttcaaaagaaaagaaaaagaagacggaaaagaaaaaagaaaaagaggaaaactctgagcaccgatatggaataatgccatttgcataaaaagtgggtaggggaaggctatggacttgcatttatttatttatagataaaatatctctggaaggatttacaagaaacttataatactggttatcagtgggcgaccccccagaaacatccacattcgaatccccggaaactgtgaatatgttgtagaagggactttgcagatgtgattaaatgcataattttggcatggggagattgtcttggattatacaggtggtcccaatgtaatcacaaaggtcctataaaagggagcaggaggatcaaagtcagaggtaagagatgtgacaacagaagcaagaagctggttttgggggttttgtttgtttgtttgttgtgttttttttttttttttttttttgagacaggatctcattctgtcacccaggctggagtgcagtggcatgatctcagctcactgcagcctccacttccccaggctcacgcgatcctcccacctcagcctcccaggtagctgggactacaggcatgcaccaccatgcctggctaatttttgtctattctttgtagagacacagtctcagtttgttgcccaggctggtctccaactcctgggctaaagagatcctcctgcctcagcttcccaaagtgctgggattacaggcatgagccactgcacccagacaaagctgctggttttaaagatggcaggaggggtcataagccaaggcaggcaggcagcctctagaagctggaaaagcaaaagaaacagattctcccctggagcctccggaaggaaacaaccttgctcacacgatgattttaacatctgccctccagaatcattaagaaagcaaatttgttgttttaagattggccagccaaggctgctgtggaatttagatccgtgtgtccaggaaacccaggaaaacaactggacctacttttgctccgtagggtgcaggaggatggatttttgtgttggatttgtggtcccatgggcctgggctcgcctcccagctctgtacactagcaattctgacactggccaagtcacttgacctgcctgtgccccacttccctcctctgaatggcagggcagtaacaccacccgacagtgttctggagaggactgggtgcaatgctgtgtgctgagtccctggctggcagcattctggagaggactgggtggaatgccatgtgctgagtccctggctggcagcgttctgagaggacggggtgcgatgccatgtgctgagcctctggcccatgtcggccttgacagtgcagctctttgcatggaacaaatcaatccctctgctgagtcagaacttgctctctgttcctggttgtgcccagagaccggggactttccctcttcttcctacctggaagtcaaagcagagctgagccctgcggaccagaatgtgggcagcctcattctggactcagcatcaccagaggacaccaaggcctggccccaggagtagggagctcagcctggctggccgagactgcctgccagctggagccagtacgtggcccttagccaaagtgccctgttgcctcagaggctccacggtcctgctggccacctttcatgacactttgattttagccttctgacctccaacactgtaagcacaaatgtgttgttttaagttggccagctaaggctgctgtggcatttggatccatgtgtgtccatgagggctctgggggtgaccgggaacatttatcctcacagcaaccccggccacttttacagatgaggaaactgaggcacagaaaagttcagtcacttgcccaaagctacacagctggtcggcaacagagctgggatttgaaccccagcacccacgcttctaaccaccacacaggcttcctctcatgaggaagctcggaacgtccttattcctggctctcgcagtgcttcctgggccacacagcaggtggttccagcttccccccagccctccaaagaggctgggctagatgaggccagacaagaagtgggagtgaggtttccaagccaggccctcatggcactcagccctcctcagcaggacagtgaaccgcgtgaccttcccccactgtcggcatgtggagaaagcgtggctccgactgccagatgggtcaccgagtgaggctcaagtgtcccaacccaggggagcccccgtagggtagaggggagctctggacacctgtgggggctgcactgatcgtctttcttgtctgagctccaaggccccgctttaactctctcaaactctctgatgtgcataggaggattttccttctgaatccaaagattagaaagtaaaaaccagttaccagaataataatatgtcagaacctggaagaagctctgggatcccctctctggcagaaaaccagaaacggggtgacatgctcaaggtggcatacgctgactctaaggctcgcccaacaccggcagcccgttccagcttcccccactccctctatgcaggttctaccttgggggcttccatagggtggctgaggggtcattggtgacagccaggaggaaacaggcctcctttctccattcttcctctctggagtctagaaagcagagctgagctctgcagaccagaacataggcagcctcattctggactcagtatcaccagagggcacccaagcccgaccctggcctctgctgaggtggcccctggcagcttccctgccctcagcaccctgcctctgcccaccctccccattctgtctccccactcaggaagggcccatcagcccacccactccagcccctcgggaagctctttgccaaggcagggtgagatcctgtgacaggacccagcccaggacacagtcacccctgaaggctcctgggctcctggggctgccactcccatctgggggcatttggcaactggcctttgcctccctgaaccttggattttccgtgaatgaaggggactcataaacctcacagagtttcagcaaggcacctgcagccctctgaccccacactgcagggacagtccctgcctccgtcacctctgagactgtccgtctacagatgccctgacatgcctatgcctggttaactccgcctcacccttcagagcacagacacctcctcgggaggccttccctgctgcccccagactcccaataacatgaaacactcccaaagcacctacagtgtgtcaggcactgttcaaacactctagatacactacttccttaatccatatcccaaccctgggagtggggggctcaagtattattcccacttcacagatatggaaactgaggcccagagaccaccagccagtaaatagctggacccagggaggccaactccacagtacgcacccttaactaccatgccgggtagcatccttactgtcccagaagcatgcttgcttcctctttacacaaaccatcccactctacacctcttcccctgagcgcacaggacaggacacgacagctcagccaacactgtcaaacccatgattcatgggaggagcatccctccaggcatgagtgagctcagcatggcacagctgtgccaggacgacccccactgacatttctgccctgcttgtgttctctttgggatgcccccacccctgtctcctgccacccaggagttgcttcctcagagccccataactgtgtccccctggctgaggcagccctgtgcccacggccctggaactcactgggctcagatagggagcctgggaaccgctgaaggccatctccaccgcctctgtggccaccgctgcctttcacacctgccaggcagtcctttgcagaaggaatgacttaacaaagtaatagaaaccaaagcaacttggctgttattcaatggggaggagccggcagcaagaggaagtgggtccagagagagaaaggtagggtgttgggtgaactggggtgacactcatagagggaagtaggcactcccagccccagtgacctttccctcctccctctcctgtgctcaaccccagcctgaagcatatttggttcatagaggtctacaatgcttgaccacactgacatgacagtgagttgccagatgacactgcccagaagtatgtggctgggtgtcctaagcatgcttggccactggttccagaaaataatggggctgggcattgcctgtgcacagggtgcttgtggggaagggcggcttcaacccattttacatatagagaagctgaggctcagagtctgagggacatgccccaggtcacacagctaattcgtggcagcctgagctatatgaagattctcagaatcttcaagaagtatttctcctctttaaatttctattcttcatgttaaaacataattatgtagaagggaatattttgcatgaaaaacactataatgaagatttttattctagagtatggggtgcccaggagcttctgatcctccccctcagtgaatctctctttcttctcttctccatccttattttgtgagctttaggatggggagagaagtcttggacataatagaacatttcaagtgacatgggagtgggaaggaacatatggcatgaactgcctttaattggcttcagcacctagttaggggaaataattggctgaaacagagaataacaggataggctgcagaggggagagggagccatgaaataaacttacctgaagttgaccaggtcccaacgatgtgctggcgagaaggcccagaactcaagctggggatgggcgggtaaggaccatacaggctcgaggggatggcaggtgccccaggccatacgtgagtctgcacctctcttccttcctgtgttctgcctagatgcactagaatttgcagacgaactcctttgagatgttcccatagactgaggccgtgtgtgtcgtctgcactcaccatcccattatgttctggatcaagtagaatttgaccaagttaaggagtagacagtacaaggggagcagaaaggagagaaaagaagggaaattctttgcaatcctctcgaacaccaggaatattttcatcacgtcacgtcatttgtagcaatcaccaattgattgggatatggaacaactggaactatcattcatagcagacttgagtgtaaaataatccaacttagaaaaatgggcagggcgtggtggctcatgcctgtaatcccagccctttgggaggctgaagcgggaggatcacttgagtccaagaagttgagaccagcctggtcaagataggaagaccctgtctctacatataatttaaaaggcaaattagccaggtgtggtggtgcacacctgtggtcccagctatgtgggaggctgaggtgggaggctcacttgagcccaggaggccgaggctgcagtgaaccctcatcacgccactgcactccagcctaggtaacagagcaagactctgtctcaaaaaataaaaaaaataaaaagaaagaaaaactgcttggtgagttgtaatatagtcaaatatctacttcaaagttgctggcttttctacttctgaaaaattacccaagagaaaggaaaacatatttgtctgtttttaaaagctttactcgtcatagccccaggctggtaacaatgcaaatagtcaccaacagaagaagggagaaatgaattgtggttttcacaccacagggtggccctcagcaataaaaaggagctaggccacaggaaacgtcaatgagccttgcaactgagcggaagaagccagatccaaacagacacatgctgtgagaattccattcgagtcaagttgaacaacaggccagagtggcgttacccttgggagtcactgactgggaggggcacgaaggagtcttcgagaggctggaaatgttctggatctggttctgggtggtggtcccacaggtgtttacatccattaacaacaggctgaggctgggtgcagcagctgacacctgtaattcagcactttgggagactgaggcaggagaattgcttgagtccgggagtttgagacaagcctgggcggcatagcaagaccttctgtgtactaaaaatcaaaaaaattagtgaggcatggtggtgcatgcctgtagtcccagctacagggaggctgaggcaggagtattgcttgagcctgggaggctgaggccacagtgagctatgatcgtgccactgcattgcaggttgagtgacagagcaagaccctgtctcaaaacaaaacaaaacaaaactcaaacagaaaaccaggatctgtacattttattctacctagacaatatcgccataaaatactgctaaaagaaaaaatctcccagagcccaaggagacacaggcacagctaagagttccagcagtttagcaccttagcatcaccttgagccttggaggtgagtcacagttaagcagcttcactagtgagtccagcccataaaggagggccctctgctccatgccctgtctggaggggccccagtaaggtcatacccaaaggctgacatgtttttagactaatcaacacagtagggaggcacttcgaggcacagtgccaggccactgagagttctgacttcggcacccttcagtcaccacaatccattcccagtggttagctctggtcttcaggagactagaagcagccctcgggaatgttcctgctcagagctctagtgttcaaagtcacagacccttctcagaggctctctcttctctgccctagagactgagggagtctgccacctcacactcattaggatgcctatgattaaaaaaaaaatccagaaaataacaactgttggccagaatgtgagtaaactggaaccctgtgaaaacagcgtggctgttcctcaaaaacctcatcatagaattactatatgatccagcaattccacttctgggtatatcccccaaataaccaaaagcaggaactcaaagagacatgtgaacacccacgtttgtagcagcatcattcacaaaagccaagaggtgaaagcatcacgtgtccatcaacggatgagtggtcagcaaaatgtgggccagacatacaattcagccctaaaaaggaaggaaattctggcatatgccacaacatggatggtccttgagaacattaagtgaaataaaacagccataaaagaacaagcactgtaggccgggtgcggtggctcacacctgtaatcccagcactttgggaggccaaggtgggaaaatcacctgaggtcaggagttcaagaccagcctggccaacatggtgaaatcccgtctctattaaaattacaaacagtagccaggtgcggtgatgagtgcctgtagtcccagctactcgggaggctgaagcaggagaatcgcttgaacctgggaggcagaggttgcagtgagctgaggtcgcaccactgcactccagcctgggcaacaaaatgagactctgtctcaaaaaaaaaaaaaaagaaaaagaaaaagcactgtatgatttcacttgtctgagatacctagagtggccagaatcaacaaaagaaagtagaatggtggttaggggctggtaggagggggaatgaagacttatcatttaataggcatagagttctggttttacaagatgaaaagagttttgcggatggatggtagtgataattgtataacagcatgaatgttcttaataccacaggtctaccacttaatattggctcttggctaagatcttagctgaggccattgactagaacacctgcaagtggcttttccacatggcttgggcttccccacaatatggtggctggagtccacgggtgagcattcccagtgagagccaggtggaacttacatcccttttataacctagcctcagaagccatccagtgccatttccaccacattctatttgttgaggcaatcacatgagcaccacccaggctcaaggggaggggaaagagacctcacctccagacaggaggcagcaagaggttgaaagagcacctgggaccaggaatatttggaaaattcaatgcctgccgcagacaataagtaagtgctggactcctctgggcactggggtacagagagaattggacatagtcccagccttaagcatctcatattccaaagggtaagatggatatacagctgggctacatggcttcaaggaggaagtgcacagagatttttttttttttttttttgagacagagtctgtctctgtcgcccaggctggagtgcaatggtgccatctcagctcactgcaagatccccctccagggttcaaggattctcctgcctcagcctcctgagtagctgggattacaggcacccaccaccacacccggctaattttttgtatttttagtacagacaagctttcaccatattggccaggttgatctcgaacttctgacctcaggtgatccacccacctcggcctcccaaaatgctgggattacaggtgtgagccaccgtgcccggccaagattttttgttaaagttaatatagttgcttatgtgctggacatcattctaggtgtcttacaattaactttatgtcagttttatgaagcaggcacaaataataatccccattctacctggaaagaaacaaaagcacggagaggtgaagcaacttgcccacagtcacacagaggcaaagtgccagagccgggactcagcccgggcagtcccgcaatggagtctgtgctgctcaccacggcaccaccccacctctcttctcagatgccccctcatgggatggacctactttcacggacctcaacgtctttgcagggaacatgggcctgagtgactgcactctgtccctagggagtgaggagggttctgccaagtggtttcattttgatcactgttttctgtgcctggggggtgggaagcccagaatggcacagctcagctcctagtcctatcaactcactctcatccagggctgattccagaggggtggcagggaatgaggggtgggggttgctctgctgaacaggaaggaacactgagtccattctcttttgtatctggggatccccagagaagaatgcaacatggtatgaaagagtggaacgccagcttctaggggagccccagtgtccaacaagggcacacactttgggagtcagccaggcctggccccaattccaagctccttcacttccaggcgggatgatgctgtgcaggctacttcactgcagtaacccccagttttcccttctgtacatgggggtgatattttctcacatgacttccctgatgtgaaatgagagaacacatgtgaagcacctagcatgatcctgccacgtagtaggcagtcagtgaccatctctccctttggccaggcttcctggcatgtgccggacctagaccctgtcccccaaggaatctgaccaacacactgcagtgtgggctttcacctcccttgtttctacacactctaccaccagtgatgtcacctaagattattttattattttggcagccatatccctcagtggttctcatcaactaaaatcctacagttctttccacaggtagcagctgcttctcagtgtcctcccagcggccatcataaatgacctggctgcagtgatagttgtgctgttacagaaatatggaaaatcccaggccacttcctgcacacctcaggacctgtttccttccacactaaaggcttgctcaataccccaacgaaggagagatgggtaagattcagaacccaggcctcccgcaccctccctctgatgagccctattcctgaggcgtattgtccagccatttgctcaagggagaaagacagtagatgctcagttcctacttggtgatgagaaggtgactgagaagggtgtgtctacttcttcagtgcggctctgcctcccagcctagaaactgactgaaataacaaccaacaattttaaaggtgggatgtgggcgggaagtggaaatctacattcacactggaaactagagtgttgtcacgggccgtccacatgctgcgagcattgaacgtgatgcgttgccagagctcacgtgggctggaaagaaggcatcaccgggtcactgcaatcaatgcacagcttcccttctgggaatggacttagtgatcctggaagggaggtgcagatcctggctggatgagggcagccatcaggctttgaacattcactttatgtgctaagtgcttcacacacttcattgatttggtcatcaccacaagcctgccaagtagcaagatcccacttcccttatcaacaaggagacggaggttccaggaggtgcaggaacccgtagcggggctgagggctgtcttggtgtcccccatggactcaggggactggggaaaggggagttagtgtttaatgggagtttcatttggagatgaaaaggttctggagatggatggtggtgatggttgcataacagtgtgaatgtacttaatgctagtaatttgtacatttccaaatggtttaaatgataacttttatattctgtacactttaccacataaaaaaggtggggggaggaaggcaatcactgctaggttgctgtggtaactctgcaagtgtatataaaggtatcaggaagaaaaagctaaaatactcacttacagtctcccattgttttgctccagaatccacacacctgctctgtctctgcaatgtacataattaaaagaatgcaggtgcttggcctgattgaattgagcctgcttccccctcaactgctattatattccagatgggataatgtggtcaacccaaagttctgagtctgaagcctgccctttttgtgttaaaagtgagatcagacccaggcgtggtggtgtgcacttgtagtcccagctgcttgggaggctggggcaggaggatcgcttgagcttaggagttccacacagtagcatgctatgattatgtctgtgaatagccactgcagtccagtctgggtgacagaaacagacccgcatctcttaaaaaaaaaaatgtggccagacatggtggttcacacctgtaatcccagcactttgggaggctgaggagggtggatcatgaggtcgggagttcaagaccaacctggccaacatagtgaaaccccgtctctactaaaaatacaaaaattagccaggcatggtggcaggcacctgtaatcccatctatttgggaggctgaggtaggagaatcacttgaacccaggaggcggaggttgcagtgagccattgcactccagccagggcaacaatgcaagactctgtctcaaaaaaaaaaaaaaaaaatgcaatcaacaccggtggagaggaggtactggcatcaacctgagcctttctctttttaaaaaattatttatttatttatttatttaatttattttacagacagggtcacgctatgttgcgcaggctggtctcaaactcctgggctcaagcgatcctccaacctcagtgtcccaaagtgctgagattacaggcttgagccaccacacctggcctagcctttcttcttgaggtcatcagaagggttgaaagacacttgaaaataacatcctcactgtgtgatgccagggtatttaatcctgcatctgtgaaggtaaagtgttctagcagactagcagacagggtccggttctcactgggcagccctgttgaggagagcaggaactgcaggggctggggctgtccaatgaccaagagaagaacaattaggcagagcggacagagctcagagccctgcatgtgagcatgttgttccccacgtccccaccccaactcttgttgcttttcgctgcactgttgggggagaccccctttctactgaatctcactgacaccatgtcacgctcccatcatggactctgggccttggggagagccaccgtggtctgtggcgggtcagagcatgtaactagagcacacagtgtgtggcagccaaaagctggaaggtgaacatacagttgacacttcctgatgctgggcgtagcagcttggaatcagctccagatgcctcccagtgacagtggagctgtcagaacctgcaacttggtggcctgcagccaattccagtctgcaaacttgttttgtttgtcctataaactgttttaaaaatgtaagccaacttctgaaaattgggagatttcacataaaattccacacttctagcatctcttaaaaaaaaaaaaaaaaaaaaaaagctgatgcggtggctcacgcctgtaatcccagcgctttgggaggcccaggtgggcagatcacttgaggtcaggagtttgaaaccagcctggccaacatggtgaaacctggactctactaaaaatacacaaattagctgggcttggtggtgtactccggtaatcccagctatttgggaggctgagggaggagaattgcttgaacccaggaggtggaagttgcagtgagctgagacgacgccattgcattccagccttggcaacaagaacaaaactccgtctcaaaacaaaacaaacaaacaaacaaaaaaacaaaccaaagacagaagaagtacaatataactttttaaatttaatttaattttcacaaagacagaattgaataatgcaacttataaagaatttttttagagaacctcccttttattaatttatttctgagatggggtttcactgtgttgccaaggctggagtgcagtggcgtgatctcggctcactgcaacctacgcttcctggattcaagtgattctcttgcctcagcctccgaagtagctgggattacagccacccaccaccatgcctggctaattatttttgtatttttagtagagacgggttttcaccttgttggccaggctggtctcgaactcctgatctcaggtgatctgcccgcctggacctcccaaagggctgggattaccggcgtgagccaccgcgcctggcctactttttctgtctttgaatgtcatagacattcaaaggttgccagtgagaggctggtgtgaagtgactcaacaggacatctcaagccacagttcccgaagggatagcaatggtgccgtgagggaggggttgtggtgtcttcgtttctgtcaatgggggggaatctgctctcagccccacaccagtgggggagcttccatctctacaaaagggagtggaatgaaagaatatgcacatcccagaatggcagtcccaggagaattcctgaggagaaggcagaaaaggcccaatgagcaggaaacagggagaaacaggaagccgcagggcaacctccccagagagagggtcccactcctctcctgtcccctccccacccatctgggcagacctcatcccatctcagcataaagctccaacagctctgaccactcctgctcaccgtgacccattctccacactgtagccacagtggtctctctacccacgaatgtctagtgcctccctcttcaaccttccagactctgtcctccttcattgtggatggaaaccaggcagggctagacaggactagctgcatgggcctacgacctgtgcagtcacagagggccccggtgttaagggccccacacttggtttaatgctctgctataactgccttgacatccctcatgacacatgaccaagagatccacatttccattttcggtgggctctgcaaatatgtagccacttctggtacccagcctcacccactggggattcatctttaagtccaggcttcgaggctcaggaatgtaaatgaagtcacatttctgtttaataacaaaattaccagacttgaaactcaaacctccttaatcacagtcttcagccaggccctattcctgagggtgtctgggccttctgggcctcccttttgggagccaagtctgttgcacaaacctgctggcttggcagtgtgcctcagccagcccaatggtgccaggctctgggcagcagactcagtgcagtgcccagtcctccccttgagcagctggcatcctacagtgcccaggccacctggctgaggtgggctccaagtttctctgtagattttctctcctgatagctaaggccatcaggcaaggtctgacaattctttagaaggtttagagagaagattctcatgtttagctaacatgcgctgagcagctcctacatgcaaggtgctgctctaagcacttttagcgcacattccaggaacctcaccatcacgctatgagggaagtactgttcatgactgctgcctagttattacaaggaaactgatgttcaggaagattaactgcacctcactggccactccttctcatcttcctgctgggtttacctcattgtctaacctctaagtgcagaggccctgggcaggcctcgattctctcctcctttcagtccaccctctcacccctgttggtcttctgcaacctcactcagccacctaatctatcaaatgactgtgaactccagattccacctgcctctcagcatctctgcgtggatttctaacagacaagctcaaactctgtgcatccagaacagagctcctgatcccccatccccaacttcctgcttctgtaggcttcccccatcttagacacttgcttgaccaaaaccactggaatcattcttaattcttctctacccgaaatctaattcattaccaaatactgtcagctagactttaaaaatatatgcacacacaaaacattatatgcagatgctccttgacttatgatggggttacatcccaacaaacccgtcgtaggctgaaaatatcaggttaaaaatgcatctaatacacaacctatgaaacatcatagcttagcctagcctactttacacgtgctcagaacacatacattagcctacagttgagcaacatcatctaacacgaagcttattttataataaagtggtgactatcttacataatttatggaatactgtactgaaagtgaaaaacagaatggttttatgggtacttggcatgatttctgctgcatgtatatggctttcataccacagtaaagtcaaaaattgtaggttgaaccattgtaaatcaggaaatgtctgtatgtatagctctatagatagatagatcacaataaaattgataaattagacttcttcaaaattcaaaacttttgcacttccaaagacatcattaagagagtgaaaataggctgggtgtggtggctcacacctgtaatcccagcactttgggagcccgatgtggacagatctcttgaggccaggaatttgagaccagccatggccaacatggcaaaaccccatctccactaaaaattcaaaaattagccaggcatagtggcacacgcctataatcccagttactccagagggtgaggcatgagaattgcttgaacccaggaggccgaggttgcagtgagatgagatcgtgctactgcactccagcctggacgacagagcaatactttgtctcaaataaataaattaattaaaaaaagaagactcctaggtgtctggcctgggcagcagggtggatggtagcactgtttactgagatgaagattaaaacaggagcagattggcgggtggctataagccagagttgagtttttgatgtgagatgcctatcagatgaaagtgccaaggaggcagttatattcccaagtctgtgcttagagggagaccaagcaggagagaggacgtgggaggggcacatgaagatgctttacacagccaggaacatggatgatgtcacaggagacagtgtagacagagaagagatgaggaagcaggaccaccctcatcaggactgagcctgtgggattccagtttctctttatgaatattttctttctcctctcctctcctctcctttctctttctttctttctctttctttctttccttccttccttctctgtctttctttctttctttctttctttctttctttctttctttctttctttcttccttccttccttccttccttccttccttccttctttccttccttctttttttttttgacaaggtcttgcttgttgcccaaattggagtgcagtggcaagatctcggctcactgaagccttgacttcccaggctcaagcgattctcccacctcagtctcccaagtagctgggaccacaggtgcgcagcaccaggcctgactaatttcttatttttcgtagagatggggtcttgctatgttgcccaggctgctctccaactcctagatccaagtgatcttcccaccttggcctccaaagtgctaggattacaggcgtgagccactgtgctggggcttgtaaatatttattgagtgaatgagacattcttcagccctaagtaaagttgatggcctcctaagcgattagattagaaactcccacagtcagatgtgggcagaagacaaggaggcagcctcataggctgagaggagctgccagtgaggacaaagaaagcctgctgcactgggatgaaccccacactccttggcagagcgtaggctaccctgggccatctgcctgccgccttcctctccactctcatctcttcctgccatccttttttcctttttgggccaattttagtattttccctaatgcattctattgcttcagaccttcacacatgctgtcccctctctaggattacaaagtcacatgaactcattatcagtaagtctaacacaatggaaacacacaacagagtagaagctggccagcacccctgctctccattagtaagcatttgcgctatgtgttcgcagatgtgttttctgcgcatattctaatgcactctctctcacacacatgcatgccagaatttcctccctgcctccaaaatgggaaatacctcctttaatgcacgccttctcctcttaatgcattacagactctttccacatacatagacagcacatacttgcttatgcttatatttcagtacaaatgtacatacagtacatttcagtacacagagaggtgccttgttctttaagatacatctttacagtttggttgtatggattaatcacaatatatttaaacaactgcattaatgaagcattcccccatccctttctttctttctttctttttttttttttaaacaggagtcttgctctgttgcccaggctggagtgccatggcatgatatcaactcactgtaaccttcacctcccaggttcaagtgatcctcccacctaagcctcccaagtagctgggattacaggtgccctccaccatgcctagattttttgtgtgtgtgcatgtatttttttaatagagatgtatttttttcaccatgttggtcaggctggtctcaaactcctgacctgaacagatccacctgccttagcctcccaaagtgctaagattacaggtataagccactgtgcccggccacactttctttctttttcttcttttttttccccctcttcacgtccactgtggagttgtaactggagacatatttccacccacaaagcctccagatgttaaaacgtttcccaacatcaacttaatacagtgatggcaacacctcccccccgcccctcccagtagggttgagattatactgtattccctagtggtttacccttccccccatgaagggtagcattttccctgggtgcagaggctccctcatagtctccaagactgaaggacccctaattttgggactgcagcttaagtgtattacattaaacaccataaaaagctgcaagatgctcttttaagggaagaggaaactggtcagagaaatgcctcccattttcattgccaatttgatttttaaatccatgaaggatcttacagaacatgtctctgagataatcttttgggttaatccatgatgcaacagcatcacaaaaaaatataaaatcttggattatgccatggggattcacactgatcatgatgcagattccacggaatgctgaatctttttctcattgtctcttatgtttctcagagaggtgcaccagggtctcgtaaactgctgtagcatgggggccacctcttgaggacaaacataaccaagacaaccaattgttactgctgtattctttagcaacgtctttggtgtgttgggtctgttaatgatttctacaagctggtgcaacaccatagggtaaatataaggctgcatctctatacccatttgaatggagatttctccaattgctcatgtgtcattgttgcagactgaaatgaattctggagttaggttggttcccaatattggcatgaaatcagctacacaaggcttaacatgctgaaagcaagcttttgtgaggtcacttaacagggcaaaagaactctgtcgaacttccggcattttatcctgcatgcactgatatgttagtgttaggatgttacttcgggctaccagttgttcaatattgcctccaagtccttcagccaggccactcagtaaatcaagagccactatcataaaatctttatctggagcttcatattgatctggttgagcattgcttagcatggcttgtgcaagagtcttctgtactaggtttacccaatgctgatacataggttcacagtatggaaggaagccagactgcagcaccgtggcaactgaaaatggacactcaggtaaagggaaaagatctttatcttcatcctttaacatgttccgtttctggatcagtggaggcattagcatttgaatatattctggtttgtttaaatgatgtcctactgaatctgctaatgtccctctggcattgtaaagaatgagcaggttcttatgctggtatttactaaatgcaaagaccagggtatcaagtatataagcaaggtaagcaacaagttctgtacaagcctcctcttctagggtagcaaagacactgcaggcagcttctggtactctcttgttgctatccaggatgcgttttagcaactctgtcattaatgacttcaggtacgtgtctggtggctggctgactacccagtgtgcatagcggctaagagtccagcatgttatggaacggacaagagcctttttatcagagaggcactgaataaggtgaggaataagctcaggcaagcaaggaatcatgccctgcatgcaaaccttcagcaactgttcctaaacccaagatggctaattctttaacaacccattcatgatgaaaaagtaattctttcaaaaggggcaatatatatggcagcagttcatcatgatgcacgtttgcaagaacatctagggcagcaacagaacatttccttagattccagtcagaaattgtatcatcaccatcaatttcattatcatcatcatcttcctcttcaattccatcttcatcatgctgctgagccactgtccttgatcggtgaaaacgtggccatatatcctgttcactatcaggaatcatttcgtcttcttcaacatcacccttaggtaggataatatctatatctgagtacttcatgccattcactaacacaggaatcaacctgggaagatgccttacgaatacatctttgcatacttgctgttcagctaaagttagccaaaattcacaggcttctaaagccacattttcatcttgatcttgagtcctctgtagcatatactcaactatattacgcatgtgagggagcaggcgatccactcaaacttcgaacaacatcacaagtgctcggcacacatttttccatacctctggctcaccagccaatgcaaagagatttctcaataaaagaatcaatgtgcaacatcagagcttgagtcctgatgataaactgattgacacatacaacagcgtgagaccttatttttggactactgtgcttgaagaactgtaaaaatttgggaatcctgatgttgagaggacaatctaaaacatcactatctaaaatctcaacagaatcttcacaaatcttctgaagggtgccaaatgctccctcacaggtggtgtaatcgtcagaatccaacaggctacagagttttggtaagaggtcaggccaattctgcaattctctcttggaggctatagctgtgatcgaaataccaacagtggctctaatcagaagagaggagtcaccaatattatttaaacattcacttttaatgaagtttgttgcaccatttgggaagttctgaaagtgtgctttcacattattcttcaagatgagaccacgcaatgaacttgtgggttcatcttcagattttaattttgtaagaacaaaaatcaagtagttgctaaagtctggatattgattaagttgttccagtttctagaattgttgcacagttctctggatggtggtgtctggggactgggactccttcaatagctgcaggatttgctgaagcccttgcttatcagatttccattcgtactccaccttggtttgctggagtgccccaaaggaagtctcggacagtgaaacccagtggaactgctcctggcagcccagccgccgacgtctgctgctgctgccaccacggctacagagcgcaaggagccaaccagactgagtccgatttgatgtgtatccttgtttgatgcccaggttggaagcatgtcacaatgagtcaactaagcaataactagaatattattgattccagaaagctttctcttattttaactctgtatttcagaacttcaaggtctacgaatagttacccacctataaaatgaattcaatttaactaaatcctagtattgtgaagaattagtttttcgccatttctgtttactcttatactaactgaaagactgtctcaccacaatgcttgatgtaaatggtctgattggttagtgacaacctcattaattattgcagcttgcaaagggattgatttttaaatttttacttattaattatatacgtgcttatttgttttctcatttacttgctttcttatttatttgcttattatttacttactttcctgttgttttaaaagaggattctaattagatattatctaagtgattttgccaagttcttacattttgttggtttaaattgctttaagatatatgcttgaaatcacgtttattcttgaaatgtgtgccatttgcagtgtgtgtgtgaagggaaatgagttattttttaaagggaaatgagttattttttaaaaagagaattatttagatatggttttagtgattcctcagcatgataactgctgatgaaatgtagcttattgttttcagctagtttacattggtcttgagacaaacagaattttgtttcttaattacaggctctagatgagtttatagaacacctcagggctgttatcaagtacttacatacgaaggataactccatttgattatatatttcataccccaaaggaaaataagtttaaatttaattttaactagatgatgccatcggtatggagtcactctgtcgttgtgtccacactggccaggaggcattttaatgaatggtgtttgtttattcagtcttagccaaatgagcaaggacctggagactgggcaatttgagaagacgtttaggaaccactggcttttctctgttgacgccactatgtaaactaaggctgacagtgggtagggaatgtgtgtggaattcctgtgtgattcactgtaactgtggtgtgctgaatgcgtgcttaagctagtgtcagcatcgtcttcctgtaagttaaagatcccttctgtgagcagggctcctgaggactcaggaatgttgtattttgaaatctgctttagaggatattttaagacttttaataaaagaaagatgactaatgtataaggggacttaaggggaagaaacaccctttcctctatagggtagcatatttgggattataatttttgttttctttaggttggtttcattttcaagtgaatccagaaaacactgttttctttgacaatattgctataaaattaccataatatgaggatatgttgtcagcctcaaatatataaaatgaccaatttcagtgagcatttatccttttaagaaaacctactctattaaaatccaattttgtgcaaaaagtgggaaataaatggagacgtaagtgtttgctttatgagactatttgattcatgtaaatagaaaatagttttattacatgtaaaatatgatttaaattggtcaaaatgtcatttccagaaagcataccttttaagccagcactcattacatagaacaaggattctatctgtgtgccacaaaccacttcaaataattttctttatatgtaatgacatataaagaaatatatgtaatgacatgttccttagagtccatctcaactccaattcctcaggaacattgtctttgagtacaaattataatgagtttattttctaactaaagtatagcagttagactagtttattagctagtttggttctgacctctggggttgagaacagatacaagacaaatgctattatatcttcagatcttatagaaagcagatagtggaaatgatgaagtgtacctggctggctttctgacgatttgtgtgaaatgcttggctttgtaattttacatttctttctagtctgatgccttgagtttatttagatagaaatgtatttctacatggttatctgatttttaaaatgctgcttcacagttgtatactacttaagtatgtagctttatatttaatctaagttggaattgggtttttgttattgtcatttggtacattggtcaacacttaataaatgtttaactttttgttttgagttaattatagatttgcatgcagttgtaagaaataatacagagaggccgggtgtggtggcttatgcctgtgattccagttacctgggaggctgaggcgggaggatcccttgaagcccaggagttcaaagatgtagtgagctgtgatggtgccactgcactccagcctgggtgacagtgagaccccatctctacaaagaaaaacaaaaagaaataatacaaagaaatctcacgtacgggcctaccaaattttattgtgtttgctttattgcactttgcagatattatttttttacaaactgaaggttggtggcaaccctgtgtcaagcaagtcttgcggtgctgtttttctaacagcatatgctcactttgtgtctctgtgttccatttcggtaacagtattttagatgttttcattattatcatatctgtcatagcgatcagcgatctttgatgttgctattgtaattgtttacaacctcagtgatataagaggatgaacttaatcaatgttgtgtatgtgtcttttttttttttttttaagacagggtctgtctctgtcacccaggctggagtgcagtggcatagtcacagctcactgcaacctccaccttccggtggaagatgccatttaagactttcatcctagaaacgagaagtcagtgcctggcttcaaagcttcaaaggacagctgactgtcttcttaggggctaacatagctggtgatgactttaaagtgaagccgttgtttgtttaccatcccagaaatgctacagcccttaagaattatgttcaatctactctgcctgtgctctgtacacttaacagcaaagcctggaagacatctgtttacagcatgatttgctgaatatttgaagcccactgtggagacctactgctcagaaaaaaaaagaattctttcaaaatattatttctttttgacaacacacctggttactcaagagctccgatggagatgtacaaggagaggaatgttgttttcacgcctgccaacacagcatgcattgtgaagcccgtggttcaaggagcgattttgactttcaagtcttattagttaagaaatacattttgtaaggctaaagctgtcatagatagtgattcttctgatggatctgtgcaaagtaaatggaaagcgttgtggaaaggagttaccattctagataccattaagaacattcatgaggaggtcagaatatcaacatcaacaggagtttggaagaaattgattccaaccaccctggatgactttgaggggttcaagccttcagtggagaaaggaacggcagatgtggcagaactcgcaagaaaactagaattagaagtggagcctgaagatgtgaccgaattgcaataagctcatgagaaaacgcgaacaggtgaggagttgattttaacagatgagcaaagaaagtggtttcttgagatggattctactggtgaggatgctgtaaacgttgttgaaacgacaacaaaggattcagaagagggtataaacttagttgataaaccagcaaaggggtttgagaggactgaccccaattctgaaagaaactactggaggcaaaatgctaccaaacagcatcatatggccagagaaatctctctaggccccagttgtttctaagtgaagagagttttagaatccatctcatatatttgttgctaggatgaagttaaaacaagtaggatatttaggataggacgtggctcataacaagctctccatgaatattagctatcgttattcttaacaaaattaccagattaatagattgtctgctctgctcctttgcactaaatttagtagtttatttcatttattttatcttcattaaggcagttggcacaaaattagtttgttaatctgggcaatagaattcttttttttttcttttcttttctttttttttttttgagatggagtgtctctctgttgcccatgctggagtgcagtggcaccatctcaccttactgcaacctccacctcctgggttcgagagattctcctgcctcagcctcctgagtagctgggactacaggcacccaccaccatgcccagctatttttctatttttagtagagacgtggtttcaccgtgttggccaggatggtcttgatcacttgaactcaggtgatccacctgcctcggcctcccaaagtgctgggattacagggcaagagccaccacaccaggccaatgggcatgtttttaacagttattctcctagcactcatcattttatgttttctctcttagcataaacaagtttcagtcttactgatgtgtgttaaactgttcccccatttatacttcagttggtttatggtttttaataatgtagatacacatgtaaggaatatttatatgtacataacttttcacttttaaaacgctgtgataggccaggcgcagtggctcatgcctataatcctagcactttgggagactgaggcgggcgcattgcctgagctaaggatttcaagaccagcctgggcaacacagtgaaaccccgtctctaccaaaatataaaaaaaattagccacgcgtggcggcgtgcacatgtagtccagctactcgggaggctgaggcaaaagaattgcttgaacccaggagtgggaggttgcagtgagccaagatcgcaccaccgcacttcagccggggagacagagtgagactccgtctctttttttttttttttttgagacggagtcttgctctgtggccccggctggagtgcagtggcgtgatctcggctcactgcaagctccgcctctctagttcacgccattctcctgcctcagcctcccgagtagctgggactacaggcgcccgcaaccatccccggctaattttttgtatttttagtagagacggggtttcaccgtgttagccaggatggtctcgatctcctgacctcgtgatccacccgcctcgcctcccaaagtgctgggattacaggcgtgagccaccgcacccggccaactctgtctcttaaaaaaaaaaaaaaaaaaaaaactgtgataaggtcaggcgtggtggctcatgcctgtaatcctagcactttgggaggctgaggcagccggatcacctgagttcaggagtttgaaaccagcctggccaacacggtgaaactgtctctactaagaaaaatacaaaaatcaggggctgggcacggtggctcacgcctgtaatcccagcactttgggaggccaaggtgggcggatcacgaggtcaggagatcgagaccatcctggctaagacggtgaaactccgtctctactaaaaatacaaaaaattagccggggatggttgcgggcgcctgtagtcccagctactcgggaggctgaggcaggagaatggcgtgaacccgggaggcggagcttgcagtaggcggagatcgtgccactgcactccggcctgggcgaccagcgagagtctgtctcaaaaaaaaaaaaaaagaaagaaaaatacaaaaattagccagttgtgatggcaagtgcccgtaataccagctactctgcaggctgaggcaccagaatagcttgaatccaggaggcggaggttgcagtgagccgagatcgcaccactgcactccagactgagggacaaagtgagactcagtctcaaaaaaaaaaaaaaaaaagaaaaaaaaaaggaagcaagctgggttatgtgcgtttagaggtgctgtaccttttcagcattataaatgaatagagatgagtggcaatagttactttggtccatagatttttggtatcttaactagttttggatctcttccactaaagggattgcctgttgaacgttgttaggaatgtaaatactgaaggcaaactgcctgggtttgaattttgttctgtcccttgcaccctgcctgggttcaaatcctagctctgcttattaagttcttttaaggtgatgatctttgagcaaatgtcttagcttctgctttcccaagtaaatggacacaatagttgctaccttgtgaaagattcatgtaattgaccagtgtttaccaagcagcatcagtgttcagtttcagtcattggtgattctgcagttggactgtgagggggtgctggggtgggggtggtgtgtgtgtgtagcacttaattgcatgcggaaaggaaaagatactttttataaccgagaggcagcttttctctgcttttgtgtcaaaagggaagaagggagtttggagagggaaaccaattctctttaatactaagctctcttcttcaaaatcagaggtagatagaatgtgtaataatttacagaatttctagacttcaacaatctgatttttttaaatgtatttttattttttcaggttgagactgagctacagttaatctgtggcaaggtgctggatgcactggacaaacacctcattccagtagctgacactggcaagtccaaggttttctattaggaaatgtaggttctatactagaaaggaaaatgtaagattaaaagttggcctttttagaatcatgactttcttctatgtaggtttccaacttttatttaaaaataattgtttaatgttagaaggatagtcaatgttgggataaaaagatggtcaggctattataaaaaatgcattagcttttgctttacctatttatattcttttgctttcatgggacctatctcattcccctcccctaaacggccacacatttcacagtgctggctgaaagtttcatgtagaaattttattttatgattaatacatttgtgccatttcttggaaccacttgcttgtttaattctagtctatcaagtgataattttgttgatatttagaggctcctcagttaatttctgtgggatttttcgttatatttaataaggaaaataataggaaatagctaagaaaaaaagaaacaaagccaattattcctgagcgtgtttaaaattattgaagtacacttgttaatttttagtatagaacctacatttcataatagaaaaccttggacttgccagtgttagctgctggaataaggtgtttgtccagtacattcagaatgtcgccacagattaacttcagctcagtctcaacctgaaaaaataaaaatgaattttaaaaaattcagattgttgaagtctagaaattttgtaagttattacacattctatgtacctctgattttgaggaagagagcttagtattgaacagaattagtttccctctccaaactccattcctcccttttgacacaaaagcagagaaaagctgcctctgggtcatcaaaagtatcttttcctttctgcgtgcaattaagtgctacacacacacaccacccctaccccaacaccccatcacagtccaactgcagaatcaccaatgactgaaactgaacactgatgctacttggtaaacactggtcaattacatgaatctttcacaaggtagcaactattgtgtccatttacttgggaaaacagaagctaagacatttgctcaaagatcatcaccttaaaagaacttaataagcagagctaggatttgaacccaggcagggtgcaagggacagaacaaaattcaaacccaggcagtttgccttcagtacttatattccccaaatgcaggccctccatttggggagtggatggagtaggagagaagggctgcaaggacccagataggcagacagagggacagagagggaaccaaagaccctacttgcaaggtgtccccagaggcaaaggtatcgtccacgggggacatggggacctggaggcagcacaaggacagctttgctctggtcgtgggagccctcttgcttcccacaccttcaacttactccgcattgctgtctgtcattgatccccaggtggggcaagtgagggacctgagtcagcatgtggctggctgctgggagagggagcacccgctgagtcacggctcctcccctggagcctccatgagccatctaggcaggtgtgcactgcccactggtgcagggctgtgggtacctgcacctgtctgtcaacactgattctttctcatacaacaggcacttgccaccactctgcccagccagaccctatcagaccacagtgaggggatggagtgggcccgcataggtgcctccacctgagtctaggcaccccaggcttgtgtctgctgggacacacctagcagggaggctgagagcaccggcttcggagccaggcaggtcatagtgtaaagccggattcttccacttatttggggaaagttgcttcccctctctgaacctgtttcctcactgtaaattcagattcatcctttattgagcacctactatgtgccaggcattgggttgagtgctggggataaagtaatgagcaagcccttatcttgatgaacagttacggaataaaatagacctgcagaaataaacacgcaattcacaactgaggtgagcatggttggtgggggaatggagagcacataataaagggtgtggcatggttgggggcatcagtgaccttctccctgagaaagagacacttgagtgaagggggaggagaagtgagccaggagaaggaaaaaggggaggggcatacagcatgtgcaaatgtcctgaggtggaaacaagcaaagtgactgccagggtaggagtcctgtgtggctaaagggcagtgggttaagtcaagcaaaggattttcggtgggagcagggaggagggggctggagtcagggcacaagcctgccaggctccctttgtgcagggcacgtcaaggggccacactgattgtctctgcaggctctccatgcctgcctggctgtggggagggaccagactgtaccaaggcttatgggcggcggcagccacagcccagactagtgagctaatgagcggtttggatgtcttgcctggtcccgttagagcctcgctcctcccctgtgctggaaggtaggacacaagggcccgagccttggctctgccattaatttgctatgtgacctgcagctggtcacagcacctctcaaagcttcaactgcttcctctgtaaaatgtaaggacaggactcactgatctcacttgatctgaggatttgacatcagaaggggatgagcaggctggggaagagagagcatcctctcactgatcagctcttagggcatccaagacctcgaaagaagggatctggggtgggctctgtcctatagagaaatcttaaggtgtcagtgtcctggggcatctattgttcccagaaggagctagctggaatggcaccttctgctgcccattcacccaccttgttcctcagatcctcgatggtcttgaagtagggactgtagtctttgatctcagcaggccgctgccactggtaccagtcatggatcttcacctccaggtcagcgttggcctcctccagggcacgcaccttgtccaggtaggagaccaggctgtcgttgaggtgctgcatggtcaccttctcactgcccaccagaagcccatcaccaccagcaaagccaccacccaagccaccaccgaagccagcaccaaggccaccaccatatcctcccccaaagccactactgaagctgctgctgctgctgaagctaccgccatagccgccccccagcctgtaggctcccccagaggagaagcaggaggaggagacagacaggccacccctgtaggtgctgggggcgcggcaggaccctccggccaggacggaggagatgcggctggagccgcccccgatgccgcccccgatgccgcaggagcccttcatggagctggaggaggtgaactggcggctgcaggtgctcatggtgccgaggagggaggtgagtgagcgagcagttggctgagtgaagagaaggtgctcaggtaaattggaaagggatgcgagtgctttatactcatgggtaggaggcgggcctggcactttccattccccttggctttcatcacccacaggctagcgccaactcccagccaggtccctcctctcctccgcctcatcatgtctgtcatattttactggaaactcattgtttggggtattttgggctttcttgtcccgccaggcgtgattcacagggggaggtatgggcctgcaggctacactttcccatggggccctgggagtcccagccctcaggaacccgcacactgggctcagccagggtgacagagagcagggcctctgcaccttaaacctggtgacctgctagctctccatgaactggatgggcctttaccatccacttagaggaagcccaccactgcaggggacagatacccagctggagagcaccggcatggcaaggtcaccttgggcacagagaggcctccctcaccatgacccgctgttagagacaaggaggtctggggggccctcccaggcctgacctgccatgctgtgctgagaaccctgtcccatccctgaaatacactcagccagtcaggtgtatggtgattcccaccccaacacccccatcaaagagaaatctaggcagctctccccagccccgggcacagaccctaatttcctccctacggtgaggatctgacatccaccacaccatagggcgggtggcctcatggaggccaggaaacagcctggagtcaggtgggtcctggctctgccatttacgcccccgtgacccagggcttggcgcttctctgagcctcagtgttctcatctgcaaagtgggagtcataccatctactctgcctactgcagtcagctgtgagaagccaatgcgacagcgtatgtgaaaggcttttgtaaaccgagtatggcaagaagcctggttggcattgttgtagcccaggcttagccccaaagtggatggagctgcatccaggaacaggcctaggggggcctttttttcttccagccccagatatcctctcagacccccagaacatccctagtgtaggcagaagtctggctcaggtgccctcgtttgagccccttgtggaactggcccaggagctgttctggggaggagtagaagctggagtggtgccaggctgtgccaagggcaaggctgaagtggacacgagggtccctgactcctgaagccccaagggtcaggggacatttctaggagtccacttggtcctgctttggaggtgtgtatatcaaaacttcagcaatctcccagacaacctcccaaagcaaacccttccggcccccaccccaccctcccctcagcccctgggctccacagaccccggcaggcatgttgggaggaatgtggtcgtgtctggggctgcctgacgcgtcctatctcctcagacaggccccaacagcccctgctggaggctccactgctcttcctgggatcaactgttcctagaagaaaagcaggaccctctctcaccccacccccaaccttgactgtcaccaaagaaaaagccagagaggggagccccccactactgtggcctaggagcttggaagacaatactgagacagacacctgtgctgtgggctccccaaatctgccagcaaaggactctcgaggatgtgagtaagccagggccccaccccactccacccacccctgacagacactcctaatctccctgcagagaatggttcccccaccctgacccagtcctacaatttccccagagagaggcaacaggggttttggctgaggggcagatgcttttgttgggagccatgttgctgttggctgtggggcaagggaaggctgtgctcactggagaaaaatgctgtgtccagagggatctgggagtgggaatggggtgcagggcccggtactggcttcctctgtgccccgccacccccacccaccaccaccaccgtctccttcttctgcagggatcaggaatagaagctccagagcccaggacataggaacagctttactttccctttcatttgattcaatggaacccaaaagaaactccttcctcccactgctccgaggggaatccaaaagataaagatggcagggaaccaatgacagatcagtccatgcacataatcttaaaaggcacttctgcagccccatcccaaccccacgcacctactccggagctctagcatggaatataagcctgatcccccatacccgttctcagaaccgtggcctaacctggagcctgaggccaacctctcttcccctgcagtcaaggactcagtgaccaaggagctgcaaacagcccggccaagcagggagcagacttagaggacaccacactcccgtcccctccctgatgccaaagaagcatggtactcagacattttaagggagggcattttctgggtcatcaggggttaaagggttgccagtcttgacagctgaggcccagagtaccccccacctctggacttctaggcaggctttgtgtgagcagcattacctgaccctccctccagcctgccccaaaaggaggggggtaaaggaggagccccgggcaggacctcctgtggttagtgagtctccctgcaccaccctacatgggggagccccgtgccaatgctaaaattattgtaaatggataaaatccatggggtcaaagagatcaggaaagtagattatagcaatcaaattttggaatctggaaaacaaagacaaagaaagcccagcgcttgcccagagagaagccaagaggcaaagcatatttacactctggaactttttaactctgaatttttaagaactctggaaagtctctggaatagggggcaccaggtacctctgacagtgaggaacaagtgaactagaaatgggagggtgagctagagatctatataaaaagcagagaggtggccgggcacggtggctcatgcctgtaatcccagcactttgggagaccgaggcgggtggatcatgaggtcaggagatcgagaccgtcttggctaacacggtgaaaccccgtctctactaaacatacaaaaaaattagccaggcgtggtggcgggcgcctgtagtcccagctattcggaaggctgaggcaggagaatggtgtgaacccgggagacagagcttgcagtgagccgagatggtgctactgcactccagcctgggcaacagagtgagacaccatctcgggaaaagaaaaaaaaaaagcagagaggcccctatagctcctctctcccttccttgtctgaacccaaccactccacgattactccaggagaaactagatgtttatgcttgagaatttccccagagggactctgaatcctgagacaccaagcagggccagtaaactgcaatcaactagtagcagagtagctgagactgagaccttctctgcccccttcctgcactcagcttccagaaagctggtagcttttacaatccagacagggaattagaggtattccttctgaggaagaccctccccaagaaaagtcctacagataactgtcccccaacgaaacagcttattctccaccagattactctatattgagacctaccagtggcaagctcccatgctatccacacacatatacacatattccaatcagtttctcagtgacttactcttaaatatgaacgactaccaaggaccaccagacatctgagaaaagcctctggcatgaaagatggaggcaagacaaacagcaagaaaggaactgaggaaactgagctgatgacagaaatagaagcactgctggagccaggactaataggctcaaagagatcagagaaaccattgcatcttgaaacaagaacaagagactgttgaaaaaacatgcagagctgtgagagatgaaaaatataaaagattattgttgtttttaagacaggatctcactctgttgcccaggctagaatgcgatggtgtgatctcagctcactgcagccttgacttcccaggctcaagtgatcgtcccacctcagcctccctagcagctgggactacaggcctaggccaccacatccagctaatttttatatattttgtagaggcagggtcttaccatgttgcccaggctggtcttgaactcctgggctcaagcaatccacccaccttggcctcccaaagtgctgggattacaggcatgagatgctgtgcccggccaaatacagcagattttttaaaactctgaataatggagttagaggtcaaagttaaagaaatttctcagaaaacagcaacaaagaaaaaaagacaagacggaaaataaaacagaatacataggaaaaagagccatttcagaaagagagaaaatggagggaggaaatcatgaaacacgaaaatttgccagaattgaacaacatgagctcccacattggaagtttctgctagtgtccagccagtggatgaagtcacagctgcatcaattcaacacatggtatttcagcctgctggagagaaagagaagaactgaaaagcttctagggaagagtgtgggaataggataataagacgtgatctagaatcaatatggcataagacttctcaacagcaacaccagaatccaagaaacactgaaaccgtaccttcaaatgctgagtgcaaatgatttccaagctagaattccatacccagccaaactatcaggcaagagtgaggatcaactaaagatctttttgacacaaaaagtctaaaaaaatttaaccctgataactcccttcccaggaaactacttgaggatgtgcttcactaaaacaaagggaaaaatgaaaacaggaaggaggaagacattggatccagaaaacaaggaaagcaacacaggaaaaagaaggatttcaggatgatggtgaagagagattccaggatcacagctgagcaggagacccaaacagcacccagaacagacaagagcaggacagaaggccctaggagacacatcttcatgaggatgaaattgaaggaacacccagggttctaaaatactgaggagatttatgcttccagcagtgaatcaggaaacaaattaatcatcaatacatagaaagtttaggcaaattgaaaaagagatatttattccaaggaaatttaatatagtataaaatgtaatatagtataatatatgatttgactatgaataacatttaaatagtcatgataatgtaaacatttatttaacaaaaatatgaatatattgagaaggtgggaagaagatattttaaaaagaagtggggaagggcaatgctgtataacagatctacatcctcatccttcacagccagaagtcaagcgattaaaaactgaaacagaaaaaccaaacagtaacaaggtaaagcctgttatttagaagtaaggagacaaatcccaaaagaaacagctgaagttgaaaaggggaggcgggaacagagctttggtatccagtctagggatggctttttcattaaaaaaaaaaaaagtcttattcacaatagcaaagacttggaaccaacccaaatgtccatcaatgatagactggattaagaaaatgtggcacatgtgcaccttggaatactatgcaaccataaaaaaggatgagttcatgtcctttgcagggacatggatgaagctggaaaccatcattctaagcaaactatcacaaggacagaaaaccaaacaccatatgttctcactcataggtgggaattgaacaatgagaacacatgggcacagggcggggaacatcacacatcggggcctgtcagggggtgggggactgtgggagggatagcatttggagaaatacttaatgtaagtgatgagttgatgggtgcagcaaaccaacatggcacatgtatacctatgtaacaaacatgcacgttgtgcacgtgtaccctataacttaaagcataaaaaaaaaaaaaaagtcttggccgggtgccatgctcacgcctataatcccagcactttgggaggccaagacaggcagatcacgaggtcagaagatcgagagcatcctggctaatacggtgaaaccctgtctctactaaaaatacaaaagaaaattagccgggcatggtggtgggtgactgtagtcccagctactcgggaggctgaggcaggagaatggtgtgaactcgggaggtggagcttgcagtgaactgatatcgtgtcactgcactccaggctgggcgacagagcaagactgtctccaaaaaaaaaaaaaaaaaaaaaaaggcttatgatgttgtacatacataacttttttaaatttaaatatttaaaatatggaaggcatccaggaagaaggaatggcaactgagaggtatgggtcatatctcagtcaggtaggggtgactcaggggtttggagctgggagggacaggaggacaccaagctgggttgagactgaaggctgagtgctggaggggaatgggatccatcgccagctgttaagcaggggagtcctgatctcacccttgttcttgatcctgaccacattctgatggaaatcattcagtggaaattgaatgtggatgagattgactctcaaggggacccagttaggctgtgcccaggtctagggagagaggaagaagatctgaacatggcaatggccatggggcagcaggtgtttcctagggtgctcatcagcacgcaattcaccagctgaggggaatgaggaaggaggagttgatggggtgtgaggagaagcaggctgggagaaggaggatttcaggtctgacgaggacatcgttctcaaggcagataccactcccttccaccctccaatgtagaaactgtgtgcagatgtgggggagcccatgggtagagttaagattcaagcgtgggagtcttcgggttaaaatacctgaaaaggtagagtggtgttaaaagaaaggcatggactttgcagacagacagaactgagtttgagctccagccgtgccacttactatctgcatgattttacgcaagttactgaaactctgaattctgggggttgtcaaattccaaaatgggcctgaccacacccacctcacagggttgcaagggcaacctcgtaaaataacctctgtagaatgcctccatggtgtcagtcagcacgtgtggacactcccccatcctgtgtcccacctcccacttccatagagcatggaggtcttccaggaagagccttcaagatcttctgagatttgtcccatttcccacatctctcaggctgtgaggctccaggaggtttctggaaagcacctgcaactcccctcccatcagttcaagaacagagatcacacaggtttgcatcaaccagaaagtcagctttattagcccatcaccagtagaggagcagggagacagctgggaactgcactgggagagcagggtcctgacccaggccttcaggaggtgaggccagctggtgggcaggaggctgtggtagaggcagctcagttctaggagcactggccctggctgaagctggatgagccctgctccttgaggatgggccaggtctgacggctcgaagaggacgaagaggaggtgaagactgtgggagagagaagaggaggtgagaaggggtctgagagctaagccaactccagggcagggagaagggagggctgggagctctgaggagaagggcctggcccccactccatggaaacaggcagaggggctgcagtgccggggagcctcaggagccttacccactcgggaagaacaggattggccagatgcgtgtggggaggaaaggctgtgggtgagaaaaggcagggcagtcagttgtgctgagagcagcaggggggctaaagggtctgggaggcagaactgaggggcctgggactcactgggcgtcctcgccctccagcaggcagcggtaggtggcgatctcctgctccagccgtgtcttcatgtccagcaagatctggtactcccggctctgctgctccatctcacagcgtagctgggccagctgctcctccacactgccaatcagtccctggatctgggacagctgcatgcagtggcagcctttggtttcctccaggctgttctccagggacgctttctgcaagtgagagagagaaaaagagtcaatggaggtggtcactcctgtccctccaggtctctgggcatgttttttgagaggtgcctggattttgatcccagttggggtactgatgggccagacaatatagagaaatgctagcccactattctagggctagtttctctatctatataacaggtcccatgagtcctctggtcccatcctgagaaaagaaaggtggaactaaattgtggcttgttgagggggtggtggccattactggtgacttgggggctgctgctgtgccgggtccttcatactatgctgagctgggactgcagctccatctccaggccctggaacaccctctggagctccgtcacctcactgcggctgctctgtaccagttcactgctggaggccacttttttgttgagctccttggtctgagacaggaaagcagagtgaaaggtgaggctctcccaaagcccccagctgggaagtgctgcaggcccactgagggcccgagccccaccttgctcaggaaccaggcccagcatctctgtggttgtgctttgccatctgctcgtactggttgcgcatctcattcaggatgcagctcaggtccacgccaggtgcggcatccgtctccacgttcacttctccaccggtctgacctcgcagagcaagcatctcctgggaagggatggcaggaggaggtcagctcagcagactcctctcctggccctgggtgcatctggcaaccccaccaaaccagcctcccatcccggaagccagcagcaaccacacctcctcgtggttcttcctcaggtaggccagctcctccttcaggccttccatctccatctccaggtcagtcctggccagggtcagctcgtccaacacccggcacaggccattgacgccagcctccacagtcagccgcagggccagctcgtgctcctaactggcaggacagaggtcaggtccttaggctgcagccctgaggattctgaggctcggggtctgctggccctgctgggtggacagctccactctttgtcccttgccctctgcccccagcccaccatgctggctgctcacttggtcctgaagtcatcagctgccagcctggcattgtcaatctgcaaaatgggctgcgcattctcaatggtggccgcaatgatctggagtggggatggaggacaggagccctggtcaggcaaggaccttactacttgagcgtgaaaggcagaaaggggcaaaaggaacctcctcaaatctggaagtcttctggctggcagggctggcatgccttctccaccagctcagggtatgcagggatgcactccatcccgatcacccccttcctgggcccaaggcagggaagcggaacttgcagctgaacccttgcaggaaataagagattcagggtaacagccccagtccgggcacagagatgctgaaaagggaccctctgccaccacttccctggatgatcctggccactccccaaaggtgcccagtctccctgtttgtaaagtgtaattgctaaaaagaggtatcccaagggacactatagccccagcctctctcagtgctccatacaccaaagtcacccaccttgtgcctcaggtcctcgatggtcttgaagtagggactgtagtctttgatctcactgggccgctgcctctggtaccagtcacggatcttcacttccaggtcggcgttggcctcctccagagcacgcaccttgtccaggtaggaggccaggcggtcaccgaggtgctgcatggtcaccttctcactgcccaccagaagcccatcaccaccagcaaagccaccacccaagccagcacccaagccaccaccgaagccagcaccaaggccaccaccatatcctcccccaaagccactagcaaagctgctgctgctgccgaagccaccgccatagccgccccccagcccgcaggctcccccaaaggagaagcgagagaaggagacacacaggccccccagtaggtgctgggggcatggcaggaccctccggccaggacagaggagatgcggctggagccgcccccgatgctgcccccgatactgcaggagcccttcatggatctggaggaggtgaactggtggctgcaggtgctcatcgtgccaaggagggaggtgagcgagcgagcagttggctgaaaaaagggaaggtgctcaggaaggctaagagcatgctgtggctgcctccaaccccagagacctttatatgcacctggggaaggcggggccctcctaactgctgactccaggttcccctctggatttcatcactcccagtcccgtccaactcctcactctggattattcagcccaggatcaactccgctgtgtgctggctcagagttcccacccagctttgagagtgtggagctgagagaaaaacacacaaatgtgagtcggtggtgactcaggctaggtggccgggaatcaggctcccgttcctggagcccttggggccagtggggccttggcacaggtggctttgtggcaactgtgtccccaggcagtgagtcagcccttcagaagaactccctgccccacagtgacagccttggctgaaagagacctcagtgatgccatcctgggctgtcttggggagcagttgcggggatcctacatgtcccactctgggcaggggcagagttcgtgtcttcactctgcttgctgtgtggcctgaggctccccacctcccacctctgggcctgtttcccctcagtggtgaccaggctggactgggtgattgcagagtcccttctggttctaaaaatcctatgactctctttcccctcttggatctaattccagttccggaggctgccttgagcccccgggatctccagaagtgtgtgcaccatacaaacagcactggccatggagccagacaggcggcactgagtccctgctctgcccttaccagctgtacagcacaggctggtcttacagccccttggtcctcagttttctcatctgtaaaaggggatgacacaccactagccacaaagaaacatgcgcgaaggaccccaccggcccttccccaagggccagccctgcccctcatcctcctcatcctccccctccagccacctgctcctcacactcacctctacacactggcaccctcccgaaccgctacgcggggccctgcgtcccccacactcccagctgaagaacaccgcagccccacacctagctcctccactcctctaccgccctctcctaatcacaggcaccccacctgcaggccggtgggagggagccccgtcctgccactgcagccaggtgtgacccctgaccccgccgtgggcctcagagttcccccctaccctgtagaaacaggactggctggggatccgttcccagcagttctctctcctgtgtccacagatcccacgctgggcctggcagctccattcatccagctgagctgggggagagcaccggtcatgggcccactcaggcactcatggagagcctggtgtgtgttgtacggttctgtgagcagggatgacgggggcgttattcctgccaccagtcctcaggtgagggagctgggattcagggaggataagtgggcttcccaagacaccaggcactggaagctgagatgtgaacctgcctgcctgttctccttgcctaagcctgttctgtcatcctgagccctctctctgtgcatctcaaatttatatcattttcttgatcagaggggacagaggggtaaccagagacaggtggagattcactcaaagtcactctgctttaagctgcagagctgcaactagaacccagacctcagccctctccaggctcccaccatgcctgcaggcggggccagtatacccaactctcacccacctccccacgatcactggcatgaggtctgcccagggtgggcgtggccttggcctgagaggctggtgcagcaccgaggactggagggaggaggagggatctgggcaccaagacggggcctcctcagggtgccgtggggcatcccttggtgctggccactggccttgctctgcagtgcctctgttgaggtgaggagcccagagacagcctgcctctgcctgggctccactggggcaggcaattccttgtctcagcagaaccagggttttgtcgctgctacatctcccctggtcactctgggatcagaggtaagagcagaatggatgcacatgccttcagagccaaacctgggagagggaacccgacactccccacctgaaggggtggcctgcccctccacacctgtgggtgtttctcgtggggtgggatgagagactgagaaaagaaagagacacagagacaaagtacagagaaagaaaaatgggcccaggggactggcgctcagcatacagaggacccacgctggccccagtctccgagttccctcagtatttattgatcattatctctaccatctctaccatctcccagagggggatgtggcaggacaatagggtaatagtggggagagggccagcaggaaaatgtgaacaaatgtctctgtgtcataaacaatgttaaggaaaaggtgctgtgctttgatgtgcacatacataaacatctcggtgcattaaaaagcagtgttaccgccagcatgtctcacctccagccctaaggcggttttctcctatctcagtagatggaatatacaatcgggttttacaccgagacattccattgctcagggatgagcaggagacagacgccttcctcttatctcaactgcaaagaggccttcctcttttactaatcctcctcagcacagaccctttacgggtgtcgggctgggggacggtcaggtcttttcccttcccatgaggccatatttcagactatcacatggggagaaacctggctttcctaggcagaggtccctgcggccttccttccgcagtgttttgtgtccctgggtacttgagattagggagtggtgatgacttttaacaagctagctgccttcaagcatttgtttaacaaagcacatcctgcatagccctaaatccattaaaccttgagtcgacacagggcatgtttctgcgagcacagggttggggtagggttacagattaacagcatctcaaggcagaagaatttttcttagtacagaacaaaatggagtctctcatgtctacttctttctatatagacacagtccgtatagaaagagacactgatctctctcttccccacacccacccccaccccaaagagggacaaaggggaccccggaatcttggacaaaaacctcagcgttcaggtgtcagggtgggcctggagttccagtccaaccacagacccatcaccctcagaactgaaaatggtcttcaaggtcaccaaaggctatcaataccccaaccggagagggcgaaagccttatccaggttaagcagcacaaaagtgagagagcacagaccggagccagctccaactcccaagccaggattcacaccgactctcacagtggagtctccgagaactcttcactctctgcccccaccgtgtgtgcgtgcacacacacccctttctcattggctcactgccccccgccaagttccccattccaggaggtgtcagggtgggattatacacaagcccagcactgcagacctgaggatctgcgtgggctgagaagctgcaggaagttgctgaccaacgcgccaaactgctcagccaactccatagatcacgcagctgctgtgtgcacagctctcgggggctgggggtgaagagggaaatgatgacgtagtctctgaccttagaagaacttatcatttgaccctggagggaaaactaacgctggaaaatgcagaacctggctagaaaccctagggtgctgggcttgactgccacgcccacaccaccggaggcagctggggtaagcattaccccgctgagcctcagcagtagaggagggggctgccctcctggccttgatccctgaaagggtcccagcagagggaggcaccagcagggcctcagaggatctgagttgacagaagaggaggaggcgtttcctctgcatcagtgatgcacacttgccccaaggtggccaagagccaggacctctaagcctggtgagcatagagaagcccagtgggcatcctccaggcagaggattcctccccgcaccctgcctccttcctccctccttcgtcctgcccatgtcaagcatgaggcggagatcatagcatacctgaggaggccgggaatcaccattggccaatgccacgccttggcttgcagtgattctccaaccagacagatcatcagagtccccaagaagattcgcagccctgctccaactcctgcatcagcaccactcaggacaagcctgctggtggggctgttttacaagctccccagccaactcagactgggaaggcaggaggcagcttagggggctgaggaggggggcagagaagctgaggggagagagggggctgctgcagggcccccagccctgggtggacaagccagagccacaggcttcagggcaggaggaaggaaaagtagagccccactgagccaggacagagcagcctggaatcggggcaagcaggggcaaaaccttgggcaggatattcagcctctctgagcctcagtttccttgtctgggaaatgggaataacagccctgcgtcacaggcatattaggggatttgaggccaaataaataaagcacctggcaaaggctggtggctagcgttatgtttatgagcaggtgtttataaagcacctactgtgtgcctgacactgtgctgggcactcagactcaaagaacaagacagagaagccctggagacatagtcttctgggggagaaggtggtaaagacaatcccaatacactaaagtcaggccacgatggggtgctggggccctgcagagaaacagagggagcagggttcctgggggagaacgaatgtccaggcccaggctctgcccctgtgacggctccagggatctggggaaatctgtgagtgccaggcccaccttcgggggtcctctcccctcctgcaagtttgacgccccccttctgaaggtggggctgtcatagcccttcacaatccaaccacagatctgcagcttctgccttgatgatggggtgaaacattctgtgcagtgggcagggtggctgtggacgaactgtgagtccttccatgagtcccatagctgggtccccagtccagcccaggcacatgtcctcagcagcctggacccacttggggtgcctgttctgcacaaacaaggggcccggactcctgtatgagtctcaggaaacccccaagaggggctcccattgcccccaccccaggagtgtgagcgggaagctggtgcctccagggaaggctgcagaccccaggggttgtgggagaaagagtgggcctctctcagggatgtttcttcaaatggtcactacagctcagggtgaggacgggtctctgtcaagctcagttatcccctcggctctgtgcatgtggggagacctgcctggctctgctccctctgttcccctcatctccccaaaaccttggttgccacaatagacccacactgcataagggctgagggactgttgtcagtccctcaggtccccttggggcaggcactgtctcttggggtcaggaccggtgtctcctcctttccctggactcagtgcaaaccagacgcagagcgatgtcatgccatggatgagtgtcccccaccacatccgtctccgtagaagacatgctgccaggtcaacccctgcaaggggggtccggaggcagctaccactggcatgggtctggcctgagagtcttatatgtgtgtccatcacacgagaccaggtgtggcagctctacagggtaaccacatatccgcagcttctgccttgaggacattctgtgcagtgggcagggagtgtgtggacgaactgtgagtccctccttgagtcccatagctgggtccccaatccagcccaggcacatgtccccagcatcctgggcccacttggggtccttggacaaagtcactcaagtctccccaccagcccctggcaaccactgcctctactggctcagctctctgggcacaccggggggctcccccattctggcctcctgagcctcccacccactcactttgtggagaagggcttcttccccagcagaggggcacagtctggggctgtctctggtccttcccacactctgacccctcctcactcacgccatcagtaattgtggaccccaggctctacaggagggagagatagccctgcctggagcctgaggtgggggaggagctggggcttggctcctcttcccagcacggaagcggggcccactcccctcccgtgcccgtctccactactgacccctcaggctgtgggacaagggctgagtcactgctccttggagcctcagtgtccccatccacacaacaaggcgccttcccctagaccctccctgcttccggggactattcagacaaatgaagtcaccctccagaatgagccatctgcagcccagggctgttcttctggttgtggcggggtgtatggtgggggcctggtgcaaacagtgcctccctcctgccctccatggccccacatttgctgccagagagcagggagacgtcagcctccaacggagcagagcttgcccttgctttgagtcgtgcagatgccgctgcaggtgcaagtccccgactccaggcagccatctaccctgcagagagaaacactctcccgggatgtcatagctccaaggtccagggagggcttgtgaccagcccaaagtcacccataccccagtggtcagtacccacccccatccctggcctctgccagtcccaaacccccaccaacccaggctcagagggctctggtcactcccattctcctcggacctgggccccacccccagcctccaggcaccaggagagagagggtgtttgggggccttggtctgattccgcagcagcagagacaccacaggtccagcagtgaggacgtggaggcaccctcctcccactaaccccctgcttgaagaaaaccaggaaagcaggccaacccacctggcagtttccagatttactacaaggaagatttccaggtgtcaggctcacctcccacagactgctccccacagccacgtttgctgccaccagcaagagctggcgttggtcagctcatagagggtgccgggagtggctggagcaggactgttccttctcattttcctaggaggcagtttctaccctccctcacaccacccctgtccctagtggggaaccaaagaggatccagaccgccagggagagtggcactgctccctgggcacagccaccccatctgcagtgccccccactctgccctgtccgcatcctgagcaacagctgaccatgtgaggaaacatccttgagagaggccccaccctttctcccatacctgcctggggtccgcagccttccctgaaaacaccaccctcccgctcacattcccagggcagaggcaatgggagcccctcttggggatttcctgagactcacacaggagtcggggccccaatcacccagactgcctcccccacccaccctccctttgtgcttatcccagcccttgcccacctcctgccccatctagggggagggcacagcccacaggacaggaaggagcaactgattgagtgagtcatctctgaggattcgggctcccacacctgagatcttcccatccatttacggatggaaaagcaaggctcagtcaggggaagtgactgcctaacttcccgaggtcacagagttactcacagggcaagcagtggcgacctaggaccacacctgatacaccgcctccaccccgggtctagcgcagcctggaccaccccctgaaaatctccagcccttgggagatgcgagcacccccctccaaactctccccagacttactctttatgctggtctaagctgacctctgacctgccagtcaacaacggggtctccacgcaccatctccccccaccctcactccttcccatttcacccttttgtccccagtgcccacttcagcggccagaacaaggacacatttcatagctgagtcaacgagctttattgtcatcacgcagggaagcatggcgaagggactgaagcagggggctgagggtggagaggccggagaccgcggggcagatgggaccgctgcctccctgcctcctggggggccggccgggaaagctgagtcctcagcgggtggtctggcggacctgctcgcgggaggagatgaccttaccatcctggacctcttccacaatggtaggcacctgacaggtggtcaccgctgcaggagaagcaggcaatttaaagtgggtaggggccaggaggccctcgcttgccccctagccctcatggacaggagccggctctctccctcgtcctcccccaggtgctgtgagtgcctccactggcacctcaacatcacactgcacacacatccctcctgtccctgccaccgcctcccttccatcccatccctctgccggtggccctgtgtgagtcttgcctccgcagatgggttatttgattctgacccagtgtgtcctgccagggaggagccatgtagactccatgaaatccatctccatttctctgcagtctccagggcatagatttgctcccatctcccccatcagactgggatcgccaagacaaaaaccaggcccctatctcctccattagactaggaaccctggggctagcatcatatcttctccatcagactggaatttggaggacaaggagcatgtccctatttcccatcaggctagagtccccagagacaggactgctttcgctcatccaaaagctgtcaagagcatagatcatgagaccatgttcctatcttcccatcagatgacaatctccagaggtgggacctgtctcctccatcagactaggatctccaaggtaaggaccagttccctggcccaccccatcagaccagacagcatctctctcatttgatcttttcctgagtatcaatcctcagtgctaacgggtcacttctcccacccctgctgagggacagccatcaactcctagaactcctggggacccagctccagcaacgtgcaggtgggctgcctgtcccatgcacccaatccccaaggcctcagccaccaagatgcttatgttctttcttgtactgagtcaggctgaaagaaaaaaaaaaacagagaggaaattagatgtgagtctgagagccccaaccctgccaagaggcccccagccctgaccccaggctcccccactcactgggcatcctcgccctccagcaggcggtggtaggtggtgatctccagctccagccgcatcttcatgtccaggaggatcttgtactcctggttctgctgctccatctcgcagagaagctgggccagccgctcctccgcactgccgatcagcccctggatctgggacagctgcatgcagtagcggttctctgtctccgccaggttgccctccagggatgctttctgcaggagggcaggaagaccaggggtcagtgagggttgtcagtgtcctcttctgggcccatccccatgcacaggactgttcctaccatgatgagctgggactgcagctcgatctccaaggcctgcatggtgcaccggagctccgaaatctcgctcttgccgctctggaccagctcactgttggtagccacctcgcggttcagctcctctgtctgcagacagaacacaggacagggtggtgtgagcctggatccctctcctcagtcaggcctcctcccaaatctaactgtggacagagtgatgccttctcaccagcttcccacgtcccaaagcccagaaacatgccatttgaaatgttaactttttatggttaatccctgcgtgtgggaggcacagaccggaaacttgagaaccagccagaacatgtagcctggctcttggtgctagtttctgacttcttgagagagaggtggggactcccaaggtctttaccctctgcctttattctgtgggggctccctagctccccacccaccccccagatcccagcttgagctcagctccaggtctgttgatgcagtgggtgaccctgtggtccatgcagcttgctgaggagggagcatctccaagacacctggccgtgggcttactgtcagtgctaaggcccctgagccccagccccgaagagagacctctggcctgcagcagcccccaccttgctgaagaaccaatcctcggcatccttgcggttcttctttgccatcttctcatactgctcacgtatctcgttcaggatgaggctcaggtccacacctggggcagcgcccatctccacattgatctcaccgcccacctggcctcgcggggcgttcatctcctatggaaaaaggggatgtggatgtgcgcatctggacccatcctgatctctcactcccaagccttcccccacgaggtgaccccactccccacaaggacccctcctttgttcttcctctgctctatctgaccctctaaatgatttttattcatctgctcagtattgcctccaccatcagactctatctcccccattagaccaagggctctccaaaataaaatctaattattaagcctatgccccaaaaatttcccctctaatttccaagcttctgtgtagatgttcagctttgagagtttgaaatgggacaagaaggagacttccttacttatcccctgccctcgtgagggaggccagggcaggtagagggagcctctgcgggcccctgggaggttccttgggtacagagaagcagtgtggtacaaagaggagtctgccctgcacgctggaccccaaggatcagggctccgcagacagggaagccctctaaggtgactaatcccagtgcgcctgctgtgctctctcccacggcctcagccatggcccagccccagggctctgccacccactcctcagcatctttgaccttctgccccagccacctcacctcgtggttcttcttcaggtaggccagctcctccttgaggttctcaatgtgcatctccgggtcggctctggccagggtcagctcatccagcacccttcacgggccattgatgtcggcctccacactcaggcacagggcctgctctgtctcaaacctgccatgggaatcaggaacttcagcccaggctgcttggaattgcaggtccaggtcctggctgctcacctgccttcattttgccaggactctaaggggttggaagggctgatgagagggtcgagtggaaacgaattccagccccggggccttgggaccatcacagggccagatcctacgcccaccagcttccttacttctctctgcctcctgcctcccctccctctcttctattccctgcctaagcccagcaaccttcagaactggctgccttcactgcatcctggactaagtagtggggctcctaggactgccccaccctgagctcctgggccttgccacaagcaaccaaggagtcctggggtcaggaggggtaccctgagatcctcccccagctgacccaggctgcccaagcccacagctaggactcacttggtgtggaagtcagcagcagccagatgggcattgtcattctgtagcaggatgttggcattgtccacggtggctgtgaggatcagcggagatgggagagtagtcaggtcatcggatgggggtggctgagcccacaccagagttctgaacagatcttcctgcctggggtcctctcttcccgcccagcccctcccttgccccgtgctgtattattggcagaggaggggcaagcaggagtctgaagggctcaaaggtgcctcttcttcccccgctactcagtaccccaccagacccccatgccaggctcagccttaaaggagaagagacagctggctgggagtatgaggcaaccagaaaagaaagggaaaatgtccccagggcagaaactgtcccagaattctagaacaagggaggggatgtgggcaaccccctcgttttacagtcagctagagggtgcccctgacaggctcccccaaaaggaggctaaaggagccctcaccaaagagtggtcccaaatcagaagtcaggacccttcctaatccctaaccctgggctccagccagcagccccgccccctgcggtttgctgagcctgtcttaagggacagcaggaggaaaggagaagccagaaaaatccccaaataaggcacatcagaggccttccccaccctgaggtcccaccccctcctttctgcctcccacccgcagcaggtgctatcgggagctcactcagacacccccactccacacctcccaaaaccccttcctgctgacccctgctccaaaggagcaagacaccacgcatccagtggcccatgggcccagccctccatctgcatcctcctgcctcatcctacaacctctccaggtggaggagctccacgagggagaaactgagtctccaaggggctccacgaggcctgtttgttcctgactcagcctactgcccccagaaaagggggatgtgggccacacaggggccccaaggcaggttcccagaagctaagccacagccaaaccacacttggctccctgagaccctatggctggactccaggcctttggccagggcaggagttggggggaaaaagtcatgccccccggagacccctcccaccagcaggccctaccttgttctgcagctcctcgattatcctgtagtactggctgtagtcacgggcgggccccggggcctgcctctggtaccagtcacggatcttcacctccagctcagtgtcggcctcctccagggcacgcaccttgtccaggtaggaggccaggcggtcattgaggttctgcatggtggccttctcacctccgaccagcagcccatcaacgcccccaaagctgctgccatagccaccgccagagccaaagctgtagcagctggagtagctgctacccccgagggcgctgcccaggccaccagcagatcccggcctgcaggagccggcacccaggccgccagacagctggcaggaggtgcggtacgagccgccccccaggccagaggagcccttgatggagctggaggaggtgaactggcggatggaggtggtcatggtggcggcggcaggaggcaggcacacaggagaagggctggaaagaagaggggccccaagtagtgtagggctgccggggttcacaggcttcctttataggccaccaagtgggcgtagcgattacaacaggctcctctgtttccgttcccctgggctttcatcaccacgggccacctgccagctcccaggtggctggggaccccctccccacccatcatcaggaatttgcctcatttctccaaatcctcgtgctgggtgccacgcgtgtgcgtgccactgctctgaggcccgtcacctgtgatttgggcgggccctccagctatgctttcccatgacctaatatgggagaagaggagaatacaggacttcaccgtccccaggccctcccaggcagccaccaccccagcccggcccacctcaaccctgtctggtggggaaatgggttgcaatgtcaggtgaccaccccctgaagttgctgtctttcaccccacactgctccacccaaggtgctggcccggggctgggtgctgaagagaaagaagggaccgagagcctatcctgccttggaaactgagcccaaacccaccaggcccacctcacagcatagaaatgccatcaagcctcggagaccaacccacatcgcagataaagaaattggggctccagaggggtgcagtgtccacactggccccttctgcagagtctgacacccaggaatgcactctaggggctacagttccatccagtcagcttctgaccctgccccatccctagaagcccttgctaacccagtctcctcgtgtaaacctttccccaggtttacactccaggctggggtgggcaaacaggggctcagctataggatgggggaaaggtgggccgtgctaagagaggatctaaaccaactgagagggggatgcccccttccactcctctcacccttctgtaccccaagagacctcagggtcaggggaggggcatttctctcaggtctcagcccacaggaaacctaaaggacattgcccaagaagaggctcttacagagaccccagccagccagccccctccccactccaggctccccaagatgtggctccttgggcgggccaagtgccccactccacagccccaccctgccctgcccaccaccccaagccccgccctgggtcccagggtcccgccaggcccgctgggtggaaggtggtcatgtttcagactgccaatggcttccacttcccagacaggcccaggtagccccaccagcagcggagagagattcctcaatagcccagtggctgccaagccaccaaagcaaacaggacaccccccatgcgtacacgcacagcggccaccctgccccacacacaccccgagctgggcagagccggtctgctttcctgggctagctgcctcgctctcaccccctcactcatcagtgccctggaccactccttcagaagcccctccccaccgagcccctctccttctgctcttgaacccaccctgggctgaggcagggagtgctccccaacaggtgtggtccttggaaagtctgtgtggccctcccagggaccagccacaggtgacagggactcaggggctgattcttagaaacttttcccaatacaaggggctgtcccttccctccacccttaatccttcctcctcctcccctctggtctttccaggagccccaggcctggatggagtgggcagaacagattggcaggtgacaagccaatacccaaacactcaataaactctccacctatcccagtccctcagcccacactgccccaaaccaatgaacagaccagatcacacgaggcattgaacttggagcaaagctttaatagcaggcactggacaaacccaggaggcctcctcagtgaggggctgcagaaagtagatacagaaagacaacaggtcatggaccagtgcccagacggacactcggggcgtggcagtagcatgctgggagctggagctgatggctgtgccgtgaccctcgaggtggggctgtcacaggcagaaaggggcctcagtgggtggagagatggacctgcttacagaagaccacctctccaacctggacttcctccacgatggcacacctggtggctggtcactgtggctgcaggcgatggaggagggaggcacagggaacatcaggcaggagctcttccccccacctgcccctgagtctgtggtccccccagtctcccacacagaagggtcctcagcctctcccccgccttggggtccacacagcaggacagggcagcttcttaccttcccgggtgggctgcgaggccagggacaaggagtactgagtggccagcctgcagggagaggagcacccatcgacccagggatgccagccagcccaggcccctgcaagcactgctggggagaagcaggccctgtcagaggaggttcccctaaattggtgaaaaatcacagttgggaatgcacagaaattagcacaggcccaagaatgaaagggcaggggttcagtgcagcaggaagaagaaaaagaaacagcacagcagtaggcctggaggcactcaccaggaatttacaaggagaagctgagcaagtggtttttccatgtcccagaggacccaaccaatagacccaattaaagcaggagagactgtcgttagactatagatggacttcaccattttcggggagcaaaaagctgcaacgtgtgactaagcatggagactccaggacacactcagctgaaggcctgatcacccttcccaactgcaaacccgaccaccacccaccatgctcttcaccctgtggctgatggactcacacagtcatcggaaccagaaacccagggccatcaatgcccactccttcatatgtgttcacccaacgcttactgagtcctgaccgtgagccacgcttaccctgagatccaggcatccagtcctgctgttttgagctataacctctcttctgcatgcaccaccttccttcccctgcccccccacccagcctccaccccgcaagacttctctggccagactccctgctctagccccctgacgcgtctctctggccccaccctgacccctctgatccatttctccctctgtagccagagtgaatgttctaaaatatcttgatgttcattcccctcttctgctccaaatccctccatggctccccattgcctacgtgatctagtccagacgctttaacttggcagtcaaggctcctcagtcagactccagcctgcatcgtcagtttcacctcctgcaaaccccacaggttcccacattcacacctcctgaactttgctggtgctcagacaccaacttctccctgggtgaagtgggcccccagcccgccccagcaggtacctgggtgcacactcactgggcgtcctcaacctctagcaagcggctgtaggtggcgatctcctgctccagctgcgtcttcacgtccagaaggacctggtgctcgtggtcctggtgctctgcatcacagcagagctcgcacagctgctgttccatgcttctgatgagcccctgcagctgggccagctgggtcctgtaacacacctccgtctccaccaggctgccctccagcaatgctttctgtgggccaagagataggtggtgcgatgagatggacgtgggacccttccccatggcagagcactagagaggagcccctcctgtatggagctgtgggtgctgccggcacagttgggtggtagtgcacccagccactgagtgtgaagggacaggctgggtggggactctggttctccaagcaggggtctataaggctgcgctcaccctggggtgacaggtacagggtggggaggggacagaggccctaccttgctgagctgggacggctcaggttctgcacagagatgtagagctccatatctccatcctgccgctctgcagggcctctgtgttggtggccagctcgcagttcagcccctctctctggaaggcagagtgggccacaggggtttatggagactttcagaagtggggcacaggaaaggggctgttcctgagccctcacctcccagaaccatcccctaaaccctccctggcctctatggggccccaaaagcacctgcacacaaagactctctgcacccacattggaccttggaggaattcagcctgctctgcggtcgtttgcatttcttactcctaccgaactacagcacctcaaagacaggcactgggtgttattcttttgcacctgttgctgtccctaggacagcggacacactcagcctgtgcttgccaagggtatgtgtatgtactcaaatacacacatcctgtaaacagctgtggtggaaacccaagaccagacttgcagagaactggatctattttgcaggccacagtgaagggctgtgtgagcttgagtcctctctgagcctcacattttacattgaagacatgaagggctggtccgactggtttccaaaagtccttccaactgggacagcctgtgaatctgccggtgttccaactgcaccagcacacggcgtatgtgcccacacgtgtgcacacctgcttacacacggccacccaccaagctgaagaaccagccctgggcatccttgcagctcttctccaccagtttcttgtcctggtcacgcatctcattcaggatgcagctcaggttcactccaggcacagtgtccatcttcacactgacatccttgtccacctgacctcaaagggcgttcatttcctgggcagagaggacagcaggaactcacccaaggccatcctggggaaagaccctggggcctgccttctctccctcggagagacaggtacggatgacagacagacagacagacagacacagataggccaacagctcctcaccctgaaggtggagatggatgttgtcattactcaaacatacagggctatgaatatcagcaacctcccccaacacacactgtgactcgggactggacttcacccatccccaacaagtgctaagccccaagagatgacaaccccccagcacggcagagaatgaccatgggcgacctcactcactgccctggcctcgcccctaccaccgccttgcccccaccaccaaccccacagcacaggcatgcaaaaagcaaccttacgctgctgtcaccgcgccaggccccgttagcaaatgttaatctgctagaggaaagcaattgtataaccagcctcaacgccagggggaaacaccttccgggtgtcctgcttctcggggagtaggctcccccagcttagagcagcacagagctcggctgagaaggaagccacaggacagggcatgtaagacctcctgaccgccccggcaggaccttggatctctatccttgggttgagccttggagtccctgggacctagaaccttctggaaaggaggggcaggagaggggcagagaggtggggtggatacgagtccgacagacctgaaggagggtccctgtgcagccgtagatatatcccttaacctctctgagcctcagtttcttcacaggtcaaaagaaagaaacagtatctttctcccagtttttgtatcagttgagttaatggctgtgagtcacttgtagtgctgggcagaagttccttgttttaatgactatcactattataattagttctaataattagtattgtgtgttcttacactgagttactcattagttagttaactgcagtgagctgagcctcaagggacaaatgaagtctatttgagaagagggctcctccaggcctcacccagggtcctctgagggtcagtgctaggcatccataaaggatgggaactggactggaagcatggcccagcccagggaggttctgggccccagcctcgcttgcttccaggtgaatttctgctgcattccctgagctgaactcacctcctcatggttcttcttcaggtagaccaggtcctccttgaggttctcaggctgcatctccaggttggctccaggcagggtcagcttgtccagcccctggggcagctccagagacccagcctcacttggtgcagaagtcatcggcagccaggtgggcatcatccacctgtagccagtatgaagctggaattaccgatcacagccaccacgatcggggagagatgtgggctccatgagaaaatgcccttggcagcctccaggagaccctccaacatccttcttgcagcctttttggaagtgagccagggtgggggtgatgagagtccccgtggtcttctctgaccctcctgggaatttctgggacccagccaaggccctcgggggttaaagggtgatgggggtaggatgcccaggcatgggtaaagacggatgccaggagagagacccttatgcagccatctcccaccatgggggtcatggcctaagctgcctaggcctcactccctcttccccaacgaaattcacctctaggctcagctgccacctcctccagaaagccctcttggattacctttctgtgtctcttttccgggccatacctcctgccttctccagcccgggtgcacactcactgggcgtcctcaacctccagcaagcggtggtaggtgtcaattagttcaacttctatggaaaaagtagggaggtatctcaaagaactaaaagtacaactacctttcgacccagcaatcccactactgggtatctacccaaagggaaagaaatcattatataaaaaggcactgcactcccatgtttatcgcagcataacttacaacagcaaggtcatggaaccaaggtaagtatccaccaacggttcattaaataaagaaaatgtggtgcatatacaccacaaagtactaggcagtcataaaaaagaacaaaatcatgtcctttgcagcaacacagatgcagctgaaggtcattatcctacgtgaattaacacagaaacagccaaatattgcatgttctcatgtattaagtgagaacaatgggtacacagggagcccaggctatttatttgtgctcaaacaaagaaacaggtggtgaggctgtgggggtttaaaggaatcaatgtatcaagtgagtgagctacagctgcgatggtgtagcattttctttgaaacatgtggctacttgagataatgggagtgctagaagcaaggagccagcaagtctagcagacatgcaagccctgcctcagcttctctcccaacactcagcttttctcccaacaggacagagtaagcagcagtaagtctcagtgccttaggaccagaggggccccagtgccccttggtcaggatgctgagcccagagagggcaagatcctgacttgaggtcacagagcagcaagccctggcagaactagcattccttttggagaaattcagagttcatggtccccaggagtcattcatttactcatgcattcattcggcaattacatattgagcatctactatatgccaggcccacttctagccccagcatacagcagtggataagacaaaccaattcccacctcaaggagctgatgctctggtcacagagacagaaaacaagtgaagaagatcacattacatgatgctaaaggctagcaaataaaattacaccacatggaatgttggagtcactctgtccaaatggtggccactagccccatatggctatttgagtttcaagcaattggagtaattgaaaattaaagagtttagcggctgggcaatggtggcttacgcctgtaatcccagcactttgggaggccaaggcgggcggatcacgaggtcaggagatcgagaccatcctggctaacatggtgaaacccgtctctactaaaaatacaaaaaattagctgggcgtggtggcgggcgcctgtggtcccggctcctcgggaggctgaggcgggagaatggcacgaacccaggaggtggagattgcagtgagctgagatcacaccactgcactccagcctgggtgacagagcgagactccctctcaaaaaaaaaaaaaaaaaaagaagtaaactgggtatgtggcaatagttactttggtccacagatttttggtatcttaactagttttggatctcttccactaaagggattgcctgttgaacgttgttaggaatataagtactgaaggcaaactgcctgggtttgaattttgttctgtcccttgcaccctgcctgggttcaaatcctagctctgcttattaagttcttttaagtgatgctctttgagcaaatgtcttagcttctgttttcccaagtaaatggacacaatagttgctaccttgtgaaagattcatgtaattgaccagtgtttaccaagtagcatctgtgttcagtttcagtcattggtgattctgcagttggactgtgatggggtggtggggtaggggtggtgtgtgtgtgtagcacttaattgcacgcagaaaggaaaagatacttttgatgacccagaggcagcttttctctgcttttgtgtcaaaagggaggaatggagtttggagagggaaactaattctgttcaatactaagctctcttcctcaaaatcagaggtacatagaatgtgtaataacttacagaatttctagacttcaacaatctgaattttttaaaattcatttttattttttcaggttgagactgagctaaagttaatctgtggcgacattctgaatgtactggacaaacaccttattccagcagctaacactggcaagtccaaggttttctattatgaaatgtaggttctatactaaaaattaacaagtgtacttcaataattttaaacatgctcaggaataattggctttgtttctttttttcttagctatttcctattattttccttattaaatataacgaaaaatcccacagaaattaactgaggagcctctaaatatcaacaaaattatcacttgatagactagaattaaacaagcaagtggttccaagaaatggcacaagtgtattaatcataaaataaaatttctacatgaaacattcagccagcactgtgaaatgtgtggccgtttaggggaggggaatgagataggtcccatgaaagcaaaagaatataaataggtaaagcaaaagctaatgcattttttataatagcctgaccatctttttatcccaacattgactatccttctaacattaaacaattatttttaaataaaagttggaaacctacatagaagaaagtcatgattctaaaaaggccaacttttaatcttacattttcctttctagtatagaacctacatttcctaatagaaaaccttggacttgccagtgtcagctactggaatgaggtgtttgtccagtgcatccagcaccttgccacagattaactgtagctcagtctcaacctgaaaaaataaaaatacattaaaaaaaatcagattgttgaagtctagaaattctgtaaattattacacattctatctacctctgattttgaagaagagagcttagtattaaagagaattggtttccctctccaaactcccttcttcccttttgacacaaaagcagagaaaagctgcctctcggttataaaaagtatcttttcctttccgcatgcaattaagtgctacacacacacaccacccccaccccagcaccccctcacagtccaactgcagaatcaccaacgactgaaactgaacactgatgctgcttggtaaacactggtcaattacatgaatctttcacaaggtagcaactattgtgtccatttacttgggaaagcagaagctaagacatttgctcaaaggtcatcaccataaaagaacttcataagcagagctagtatttgaacccaggcagggtgcaagggacagaacaaaattcaaacccaggcagtttgccttcagtatttacattcctaacaacgtgcaacaggcaatccctttagtggaagagatccaaaactagttaagataccaaaaatctatggaccaaagtaactattgccactcatctctattcatttataatgctgaaaaggtacagcacctctaaacgcacatacccagcttgcttccttttttttttctttttctttcttttttttttttttttttttgagactgagtctcactttgtccctcagtctggagtgcagtggtgcgatctcggctcactgcaacctccgcctcccggattcaagctattctggtgcctcagcctgcggaatagctgggattacaggcatgcaccgccatgcctggctcattttgtattttcagtagagacagagtttctccacattggtcaagctggtcttaaactcccgacctctggtgatctgctcgcctcgggctcccaaagtgctaagactataggcgtgagccaccgcgcccagccgaacatgtttcttatgttttgcaatatagacaggctgaggatttttcagatattcaagctgtgatttccttttttttttgacagactcttgctccatcacccagactgctgtgtagtggagcgatcttagctcactgcagcctccacctcccaggttcaactgattctcatgcctcagcctcccgagaagatgggactacaggtgcatgccatcacacctggctattttttgtatgtttacaaaaatagtagaggcagggtttcactaagctcgtctccaactcctgacctcaagtgatctgccctcctcggccttccaaagtgctggcattagaggagtgaaccactgcatgtggcctgtgattcctttttaagtattattttatctcttttctcttgcactttactataagtggtaaagagaaaccacaccattcgttcatcactttgcttagaaatctcctcagcaaaatatacagtttcatcacttgaaagttctacctttcacaaaatattagaacatgatacatccaagttctttgccactttaaaacaaggatcacttttcctcctgtttctaataagctgcatctcatttccatatgagatctcaccagaatggcgttcagctttcagaattttaccaacattctattcatgatgatataggcattttcaaagccaatggagaaatgcttttaaaaaatagttcacctcttttctttctgtagcagcaccgtaacttaattggaaggggatacaatccagtctgtccgtaacagttggtcactatggttccaagcttgagtataactacaaaacatcttttttaatctcaagacatttaataaaaagaaataatgttaatgtagttagagcagattactagatgaaatgcatgacagataaggaattgatgtaagcactatatttcactcaggtcattttaaaaccaccataataactatcaaatcattgcactgggccaggcacagtggctcatgcctgtaatgctggcactttgggaggctgaggcgggtggatcatctgaggtcaggatttcgagacgagcctggatagcctggtgaaaatccgtctctactaaacaaaaaattagccgggtatggtggcacaagtctataatctcagctactcaggaggctcaggcaggagaattgtttgaacccaggaagtggagattgcaatgagccaagatcgtgacactacactccagcctgggcagcaagaacgaaactctgtctcaaaaaaaaaaaaaaaaaaaaaaaaatcattgcattgaattgtatgctccaaaattttcttcattctcaacaataaatggagataggtgattataagaacacaattcaatattgcttgaaaacattccagtaatttcactggaaaaatgtttataacatagaatatgagcttaatgataagaaacttgtttgctctgttcaatactgaatactcaattccaatcactgggcctggtatgtgaaaagagcttcttggtttaaaaaatttacttaaattgtcaatgagtgagggaaaaataagacacattttatgttatactacctacaatagcaatagaaattgtcgaacagattttactttttaaatgccgattttacttgtaatctatacataataggaaaatgggattaggtttttattaactagaagaagctgttacgagaacgtcgacagaagtcttctgagtattttcaagtgcaatgttactcacgtttaagaaacaacttagatatatgataaataaaaaatttgttgtgcaataaaattacagtgcaagacgaaccataatctgtacaaagaattaaaacctaaatatgtcaacggatcgtaagtatcaagtgacaacaaatgaatagattaatttttacagggctcatgacctctgcttattacctttaaatgactgcaaaagaaaaaataactcttttggcaggttaatatttggattttatctatcataatcacttatgccatgggtcccaaaaaatgttccgggctgcatatatgttctgcatatgaatcttggaagaatactcatttactgtcaacagtagttgttttaaaaagtaaaatgacattttatgcagaattctcttcttttcccttagcatgctgtgttagtttcctaaggctaggaacagaacaaatgactacaaaccgtggggcttaagacgacagaaatttattttttcaccattcacgaggccagaaattcaaaaaggaggtgtgagtatgattgatttctttgagaggctttcaggtaaaatctccttcttagcttctggtggtttccagctgtccttggcattccgtgactgtaggcagcgtaactccagactctgcctcccttgtcccatggccgtcttccctgtaggtctctgtatgttcccacgaccttcctgaaaggacacagccattggctttacagcccaccctaatgcattgtgaccttgtcttaactaagtgttatctgcagagaccctgtttccaaatagtttaacattcctgggttccagctggacatgactttctgcgggacactattcaacatgggaaacatgcgtgtattttttagaacataatgagttctgcctctgttataaagccccctttcttttcattagtgttgattattataaaatagcatggagagttgacagagctctaagtagttctgtacagccacagcacgggaaacaaatgggggagtgggaagaaataagatttgataaatagttcagggcaagatgatagaagggcatgtacatcatgctaaaaaaaagtgattgctgttttgtggcaaggaagaacaataaaaatttagaaatatttattaggtgtctattctgtgttaataatgtacaaatacattctggggataatgagctgaaaaaggtatatggcttcatgtgtatcacagtgcaacaagaaaccaattcctgagacagaaacaattggtaaaggagcacatttggtcatgcctgtaatcccagcactttgggaggccaaggcgggcggatcacgaggtcaggagatcgagaccagcctggcaacatggcgaaaccccgtctctactaaaaaaatacaaaaaattagccgggcgtggtggcgggcgccagtagtcccagctactaggggggctgaggcaggagaatggcgtgaacctgggaggcggagcttgcagtgagctgagatcttgccactgaactccagcctgggcaggagagagattccgtctcaaaaaaaaaaaaaaaaaaaaaaaaaccaacaacaacaacaaaaaccaggagcatatttgggtttctcaagcttgaagttgaaaaaaattaggtagaaaacaggtctagccacgctgaaatgttcctagtgtaaacaaagtaataggaggaaaatctcctgatatctcaaagggaaagcatgaagagatgacaggaaataggattcagagctttgcaacattgtaaagtgttaccagcgttaagaatgttcttagaagaaagaaaaacattggaaaataaaaagagaaaggtggttggagttataaaaaggagatggaggaagaaaagaatataccaactggaagagcaaaagttgaaaacacacaaacttatgagaacattttaactttaactgaggaatgttcagtgacacaatagagctctccccatctcttctccctttctcggtgctctttttcccccactatcttcttcccctcgccctctccccgctgtagtttgttcttcttttttgagatggagtctcactctgtcatccaggctggagtgcaatggtgagttctcagctcactgcaacctccgcctccggggttcaagcgattctcctgcctcaggcgctggagtagctggattacaggcgctcgccatcacgcccagctaatttttgtatttttagtagagactgggtttcagcatgttggtcaggcaggtctcgaactcctgaccttgtgatccgcccgcatcagcctcccaaagtgctgggattacaggcgtgagccaccgcgcccggccttgtcctcatcgtcttcttttccaccctcctttctcctcaccgttttcctccactgtcttctctaccacactgtcttctccctgcactttctccccactgtcttcttccccacctttctccccatcccactttccaaggtctttcccaccctctccgtcccctcctccccctctccccgcagtcttccgggccccactgtctttcgcccgcagccaacactgttcagttctgaggtagcggcgggggcgggggcggcggcagccgtgatggccctggcagcgactctcctgggtctcctgttggctgttggggcggagctcaggggcccagctcatggggctggctgggcgcacagacacaccaggcgcagggacacaggcgggcgcacgcgtggagcgcttctaggtgaaaggcagttggagagcgcgagaagggggtgggcaagaagacgatcgggggcgaagacggtggggagtggaagaggggagaagagggtgcggggagagaaaaacgcggcaggaagtcgctgctgcgagaaggtggggaggggaagaagatggcggagaataagaggctggggaaaaaagacgatgggagggggagagaagaaagtgggaagaagattgcgactgacagacgctgctgcgagacggtgggaggacatgggaagaaaacggtgtgaggggaagaaaacgggggacaaaacggttgtggggaaggcgcggggagaagacagtgaggagaagagggcgtggggagaggacggtggggaagaggaagagaagatggtgaggggagagaaaagcgcggcaggaagacgctgctgcgagaaggtggggatatggaggcggcaagaaaatggagaagaggctgggaaagacgacgattgggagaggagaagagggtgggaagaaggcgatggggagaggagaagagggtgggaagaagactaaggcagacatgggaagaaaagggtgcggggtgaggaagaaaacggttggcggtaataggccgggagaagacggtgaggagggggaggggagaagagggagcggcgggaagacgctgctgggggaataggcgggaaggtggagactggaagccagcgggtggagagaaggagatggaaggaaaagctgccgccacaggaacccgtgctgcgaggaatgggagagactgaggggaagaaaacggtggggaaggggaaaaaaaactgcgggggagaagaaggtgcgggaagaagacagtagggagacggcagaagaggatgcgggaagaccgcagtggggaagaaggaggggagaagacggagaggggagaaaaaggtgggaagacgttgggaaaggagaagggtcgggaaggagaggggagggaaggagaggggagggaaagggcagaaggtggggaagaagactggaaaaggggtgaagggaagaaaaggatggggagggaggagggaagagggttggggggaagaagaagggaggggaaagcggcgaagacgaccttggggaaagagatggagaggggaaaaagatgggtgggagagaagaggatgaggcagggaacgaggtggggaggggaagaaaaaggcagaaagacgggctgagaagagtgctgggagaagaagggggagcggagggagggagaagggaagcggggaaagacgatgggagaaggtggtgggggagaagaaggcagtgtgggagaagagttgagggaaaaagaaacaatagtgatgctaatgttaaacgtcgtcgtcttggagcaaaagaagcaagtgctgctttagactcccggcctaactttgttcaataaattcccacttccaaatatcttgtgattgcagtgtgggtcatttttagtacttagatccagagcagtctctgattgttagtgacagtgctgtcaaattgcatgctgttcaccagctataaacgaaaacatcacatttccttgaagtgcactttaacgtgtaattcaaagacttttccaagaagcttattggggaaaaatagaggtgtgtacctttggcattggacatggagtctctgattttagattgtagttgtttccccaaatctttaagattgtggcagaaacatgattgtgactacggcattcattttgtagggcagtgcgtgttattttaacaaagggtaaactgatatgcctataagaaaatgtaattcaatttaattcactcatacaaatttaggtttccttaatataaaaaaacccaaaaacagttaaattgccttagtcttttaacataatttcatgcttagagtcaagagaatttgtaaatgcaatcctgtaatgctggtgttgcgttatgcctatataaaataacatgttaaacctaaatgttccttttttatttggcattatggaacttcatagaagtttatgtgtattaatacaggtgaacttgacataaattattaattggtgaatgataacttattgcttgtaaaataagcagttaaatgtaaggatgtaaatacattttatattaccctatagtttattttaaatattttcttcttttgtattctagtttaaaatcctggaatacttactgatatcttatttccccatgaaaaggcttccgctaactatactgtatttccaagcaaatgtctgtaccagaacatcaagtgtagaaattaagcaaaatctgtcttttaggacaggtgcagtgggtcgcacctgtaatcctagcactttgggaggccaaggcaggtgggtggcttgaactcaggagtcccataccagcctgggcaacatggtgaaaccctgcctgtacaaaaataaacaaattagccgggcatggtggtgcacatcttgtattttattcaatcaaattgaaggcttcatttacccttggaaaagaaaatgatttaatgtactctcatagaaaataattaacctcatgcccagaacgggttcacttacagcacacgttcattcattctgtcagacagtgggttaaatgtgtctgagcactgcctatgagtcaggaacacaagtcagtatccgcactgaatattacccaagctttttccatctgttatatagagtaacatagataacttcatggacatcatctctttaatttgttgtggaatacttaacatgacctcctcgtatataattatcagtgctgttcttaaatagatgttatcatctggatatttactagacttacaatgacttactgcagaaatgtcatccatatctaatgtgtactatactaagtctcacatggtggttttggttttaaataagctcttggaaatcaggcggtttgcgttttgttttcatcttattgtatactatgaagtaaagtcaataaagattctggaaacacagctgtgaaaaggtccattgttaggtccctccatgcaagctttgggtatttgacacaccatcaggcataggcaacatttgcaacattaaaacaggaagttgcaatttgggtcatcctcagtcactgacagtctatgtgcaaatttaacagcatggccaccctatatacacataggacagtgtttggattggctttttaaaacaaattatatccttttgccaaaaaaaaagatacgcatggtaataactgcaagttaccatgctttcttaagaaagaatatctggaaaatatatatgaaaacaaactacatatgcctttttaaaaacattctatgttattgtggaagcaaagtcacagaaaaaaatggttagagaaaatctgaatcagcatgaaataaaatattttgagggttattgaacactgttcattttcatgaaaataggacaagttcatttagcacagctatttctgtaattgtgatacattagcaaaattagctgtgttctgcggtgctcgaacttgctctgtgtatgaaatggcgtaccgttaatacaaggaaatttgttgtgaaacacatactgtagaattaagttcaaaatctctctgtgcttaaatcacttaattttgttaaataaaacttggtttccaacattggttttttttctccagaaaagcacaatctgctaaattcttaaccaagtggaaaagaaaatattcaagaaaaataaagcaattgtgcacgtcacactatagttgaaagtgttctgatactgaagctatgtccagtattttaagctgcttttatgcaccgtgattacttctacattaatctcagaagattctagatggaaattcaaacggggcccagccaattaaatgtgactctctgagagaatcctagtgatactgacttttccgttttctgatcattgatcagatggttacagatgcatgaaagatacatgatttttaaaaacaagatgttatttaaaataccagtgttcagtgcttgcatttgcaagaacataaatattagatgatactgagaacattccttaataatcagcaaaggtaaaatgttgttgttctgattttgaaaaaagtgaagagggttaccatgaaattattaatttttttttttttttttttctaagacatagtcttgctctgttgcccaggctggagtgcagtggcgagatctcagctcactgcaagctccgcctcctaggttcacaccattctcctgcctcagcctccaaagtagctaggactacaggcgcccgccaccacacccggctaattttttgtatttttagtagagacggggtttcaccgtggtctcgatctcctgacctcatgatccgcccaactcagcctcccaaagtgctgagattacaggcatgagccactgcgtctggctgaaattattaatattttacttacatttgttaccaaataactgaattctaaagtagaattgctgaagtcactggagtttgatacttcaggattgatggttttggttgaattcttaaaaaaagtcaaactataactatatggtataaacaaatatgttcatttgtttaatagaaattaaatatatatacatacaacattcttaggtcaaatagtcaattgaatggttaacaaaactacttcccagtcaattgctttgtcattgttaagataaatcttcaaagaatttggattttttaaaaataagatttgacttgtaactaacataagtatgaatttgatagttatattttgatttgtcagaaatctgaatgattatagaaaattgtttcagtatgtcaaattagttccatggcacccgtggttatgtaactgttggtacctgtggggaggggtcctttttttcttaattctcaagcccataagcaatcattgacaatactcaattctgattccttttcttggggccacataaagttttatccctgtctctatttctagaaatatctagaaaaccttcctatcatgagagagtcttttgccagacaatataatagtttttcaggagtgcaactgcttggatagatattttcagtttggagttgtcaaatcatgttctatcatctcaactattccatatgccagcagtgttttgggattgtgacacaacatttcatttttcattttattcacttggaaaaaatcaaataataactatgctgttgccttaggaatcagaggtatttgctgtttgatacagagtaggaacattgcaattacctcaagaaaatgatgacattcttctagactgaaaaatgcacgtgtccttgaccaaataacaactctctttcttgtacagatggcccagacactcagaaactgcctattcagaacatggcacatcatagagatgaatttttaataattttatttgcccatgttttctgatggttctatttcactgtgaacgctcagtaccaacaattaataacaggtaatttggaggctggtgtttacaactgattgatcacaccggttacagatttctttgttccttctccaattcagtctacgctgtgacaaaaaataagacatttataaatataaacattttatttgcagtgtagcatacattcaaattaggtggttgtgtagacattttgacaaatagtgccatttctcttttaacacataggtccttagtaagcactgctttctaacaccagtttaagatagttcttaattcttttcatctaacgttacaatataaaagtttcaagaatggcgcaaagaaaaaattatttgtcaaataaaacaatattatcagacataatcaagaacatttttataagataattttgtgaggtcaacaacaaaacaacacaagtgagagaaaatttcaaataccattttttatgatgaataaatgtcagacttatgcttctgataaagacagattaggtatcctagaataatttaaattaggttttgtatgtaaaataacattttaaaacaaatcaggtcctggcacagtggctcacgcctataatcccagcactttgggaggccgaggtgggtggatcacttgaggtcaggaggttgagaccagcctggctaacgtggcgaaaccccgtgtctactaaaaatacaaaaattagtagtggcgtgcgcctgtagtcacggctactcgggaagctgaggcaggagaatcccttgattctcagaggcggacgttgcagtcagccgagattgtgccactgcactccagcctgggtgacagagcaagactccatcacaaaaaaataaaaataaaataaataaatgaataaaataaataagaggtaataatttattattattttttaacactaactgagttaatgcacagctaagaattgtcaggctaagatttggagagaaacagcatttagagaaataagagctgctttgccctggagccatttattacttcagatgggatatctaccaggttgtgttaaacctctgctagtcttgcagaggcccccagtttggtcatggatatcaaaagctgctggtacattaaagcagtgagaaggaaccagaattcacccagtcaccacagcaggctggctgctctccaactgagtgcccaaaaaggttccaactccaaatttttatgaaagtaattcagaatttgactgtccttatacttctgcatgagcaaatagcaatcatttgagaaagaaaacattagttgggcctctaaagacagacaaaaccagttgttcacccactatattttgtacatttgctcaaagatgtgagggtcaatgaagaaaaaagacactgtgagaaggaataaacagatgccaaggaaaaagaaaaaaatgtgtcaaagcaactagaattagtatattcaaaggcatgaggtcaagtttggaaacttcaacaagaaagtggaaactatgaaattgacaggttagggtaaataaaaacacacaaaaattctaagactaaaaagtgtgaggaagaaaaaggtgactcaataaatgagtttaacagcaaatgaggctgggtgccgtggctcatgcctgtaatcccagcactttgggaggccgaggagggtggatcacaaggtcaggagatcgagaccatcctggctacacagtgaaaccctgtctctacgaaaaatacaaaaaattagccaggcatggtggtggacaactttagtcccagctactcgggaggctgaggcaggagaatgtcgtgaacctgggaggtggagcttgcagtgagccgagatctcgccactgcactgaaaaaaaaaaaaaaaaaaaaaaaaaaaccttttgtgaatccaagcatctcttacaggtctactgcttccaccccttcccatctgtcatctcaggtctcgattagtagcctgtccttctagatgctttttactccttctattgttccttttgtctttccatgaagccatctagccgatttttcaaaaatatcatttaaaatgtcaccctttggctcaaattctttgaatgagggcaaaactcatcttttatttttttttaaaaatttaacttttaaggtctgggtacatacgcaggcttgttccataggtacacttgtgtcatgggggttgttgtatagattctttcatcatccaggtattaagcctagtacccactatttttttttttctgctcttctccctcctcccaccctccacccttcgaaaggccccagtgtttgtcattcccctctatgtgtccatgtgttctcatcatttagctcccacttataagcttgctaaggataatggcctccagctccatccatgtccctgcagaggacacgatctcattcttttttatgtctgcatagtaccccatggtgtatggtgtgtatataccacattttctttatccagcctatcgttgatgggtatttgggttgattccatgtctttgctattgtgactagtgctggaatgaacatacacatgcatatgtctttataataaaatgatttatattcctttgggtatacacccagtaatgggattgcttcattgaatggtatttcagtcttgggtctttgaggaattgccactgtcttccacaatggctgaattaatttacactcccaccaacagtgcctaagtgttccctttttctccacaaccttgccagcatctgttattttttgactttttagtaatagccattctgactagtgtgaggtggtagctcgttgtggttttgatttgcatttctctaatgatcagtgatgttgaacgtcttttcaaaagaaaactcatttttcttgcactgttgagctgattaccatcagttccaaacctcccccctttaccttgcttgccggctttgccttttctgtggcacggtgtgaaacttcatctgcagcatctgctaaagggacgctggagaaggttggggctctttctagttctgagtgctcctcttaccttgctcttgtgggggacagcagccaaccctggccatcacctctctggggacagagcaggtcacaagcagcacttaggggagcagttttccagtgttttgtcagtgtagaaactcagcaaaattctctgctgtctagcaggctacatcctcaccctctccaaggaggtctagcactcacttctggtgtgtgtgggagattcttccagatttgtttcttcctgcagtgcttgcctgaagctctggagagcacattggcagctccgtgaatttgctgtccctattttgtgtgtgtgtttgctttgcctttcctaagcttgtccaacccacagcctagggctgctttgaatgaggcccaacacaaatttgtaaacttccttaaaacactatgagatttttggctgggtgccagtggttcatgcctataatcccagcactttgggaggccgaggcaggcagagcacttgagttcaggagttcaagaccagcctggccaacatggtgaaaacccgtctctctactaaaagtacaaaaattagccaggtgtggtggcacatgcctgtaatcccacctactcaggaggctgaggcacaagaattgattgagtctggaggcagaggttgcagtgagccgagatcatgccactacactccagcctgggtgacagagttaagactctgtccaaaaaaacaaaacaacaggctgggtgcagtggctcacacctgtaatcccagaactttgggaggccgagccaagcagatcatgagatcaagagatcgagaccatgctggccaacatggtgaaacctcatctctactaaaaatacaaaaattagctgggcgtgtgcctgtagttccagctactcgggaggctgaagcaggagaattgcttaaacccaggaagcagaggttgccatgagtcgagatggtgccactgcactccagtctggcaacagggcgagactccgtatcagaaaaaaacccaaaaaacaaaaaccaaaccaaacaacaacaacaaaaacccaaaacaaacagaaaaacactatgaggttttttgtgattttttttttttttttagcttattggccatcattagtgttcatgtattttatgtgtggcccgagacaattcttccaatgtgtcccagggaagccaaaagattggacacccctgctttaagagagaattccctgaaatagttaacagttatttactttcaattttccttattcaaattactgtgcagtttcagcctcctggttggacagtaactgaccacaatgtctcccaaggcctggcattatttagctcctggcattgctctgaaactgtcgtctaccatcctcccgttgtgcactttgctctggcctcactgatgggcacgttcttcccagaacatcctcctacttaagctttgtcttactttttgcctagaatcttcttcttgctattcaaatatctcattaccagaattttccacatatgatgtaaaatgtgcttctaatacaacactttctctctactttagcctacttcatttttcataaaagttcttgtcaccacatgacattacagtcatttacttcctggctctctgactcctctcactggaaagttatgcccttgacagcacacacagtctgttttcttcctggttaatccttgtgcctgcacctccgtatagcctagcacgtggtagacaatgaaacgactgaatgaattaatgaacaaatgaagtagtatacttcctagatgagaaaactgagactcaaaagtgataagtaccaaatcagtataacataaaagttaggagtttaagctctttggggagaaatgtgggtttaaatgtgggttttgctacatcctactagtgtaacttatatatatttcttaaattctctgtgcctcattttccttatctgaaaaatgtggattataatggtaactactttatactgggctatctagagtaaataaattatgtatataatatgcctagtacagtgcttgacacaaattaacaattccacatatttagttacttgtacaattatctgtagctgcaaaactataaatgcaggtttgtcatctttctggggagatagcaagagaaaggttaagtttataaaatgcctaaataataaaaactatattatcaaagtaaaatgcctaaacgagggctggttttaatatcaactaattagtagctgcctaatagtaagaactgactctaaaatcaagtagacaagaaaatggtcctgcctgtgccctctccctgaatgccctgtgggtcagggacacccaattcccttgtctcccttgctcaaggcttgttgtcctggcaaccttggaggaggtgcaggagtgaggggcctctgctgctctctgaggctgtgggtgcttgtagggagtgggggggtctcccacaaatgggtctggctcctctagtaactttgagggccctgtgaggggcagagcgagacaccgtggaaagtgggagggggcttgttggaggctcttgcccacatccccctcctgcgtacacaacatgtctggtatacacacactgagcgcctgccctgaggactggtgggcctcctgtactttcttagagtccaggaggaagagaaggaagaaaaggtgaagaggaaggcccaggtagtagggttgctggtccggggcactcgcccactattgactgccccagagggtgacatgggaggggacatggcactggagcccacttgggggtggcaggtccccttgcttccttgttagtttcttcgtagaggccctaagatgcttgagcacagtgtcatcatccgtggcccaggtatggaagaactggttccgaaaacatgccaaaaggccagacctggatgtcttcatgaggcgctctagggacagggtggatatcaggccaggacagttacctgggaatggtcacagctcataccccgtggccacttcagtctcccactgggccgtgccggatccttttgtggccaccccaggcgtccagatgtacacaggagactgtggctggggggtgatctggacagggaagtgctcaccacactcctgactttcatctgggtcatgtgagggatgggctcggcatcacagtgcccttcccaagcccacctggccagacctccctctgggccagaacagaggatcatgaggacagtgtgaggaagctgcccttgggccagtcgggtctgaccgcagggctccccaggccccactgggtacacatagacttactcttctgaaccttaaaagcaatgcttctgatcggcatcaacacctgtccttccagcaaatacatgtcccacaagcacagggtgagcccgagagagatctgtggggacagcaggtgtgagacaacctggcccttccaggctggggctggtggctcaagctgcacacattggggcttcagtctccagagtcagtgaccttccccatgagggtcgcctgagccatctagaatggtgggtcagacaaggtcttgcagctcctcatagggggcactcatttgagtggggatgtggctcctggacagaggggcttgcccagggcttgaggcttccctgagccctctcaagttgggtcctggcccagtctgcccatgaggctgggcctgagccccagccattgccctgggatgacccctcttgggcagagggttttgcttgtgtgtccttcggggacccgcctgagcctcctgtgggctgggagtgagccagacccccggactggggaagcagggcactgcagggcaaggagggtccctgagccagggtctccctatgcctccttaccccttgaatcaacatccggagaaggcagcctaatgaggaacactgtccgcatagaccttccttgtcctgatgggaggaacagaggtgctcagggccccctgggctgccctaaaaacctccatcttccagggcctctgaagacccttcccctagtgcagaacactgggcggtgtccagagctccccacaacactgtccccttcccacactctcagtggacacactgacctttgacttgctctgcgggagcggggcccccatccctgtgcctctgtctcctccagggcaggaaaggaaacaaactcccagcccatggagaacccgacgtctcaggtcaggccctggctgggactccgccagtcaccagtcccacgagggtctccagtccccctgctcctacagccccacgggaggcaaggcctctgagaagagccaaggggacaataaactcacctgatgccacatggtcttgggttgtgacttgggtaccacatgctcctgttggtcttggagcccctggactgtcccgccatttgggctgtggaatcctgagaagcccccagcccatcatgaaatcagagccttcccccaagatgtggagccatcagctgcaagagctgggcagctgcagaggcccccaaacccgaaggcctcccaccctcccatctggtgaccccaccatgcggcctttgccctggggaggtgggacaagaacatcccctggagcctggctggaggttcccctggaggcctcctgggctagggtgcaaaaagggcaagcctgactttgaggtcacaacagagcagccagaacacggtgggtgctgggcttcctggtcatcttgtggaagtggggttgggccaggggacacgggatggggagatgctgccacctgggcttggttagcccattcgtgggcaccaagggcagcaggagcctgggcagctggagggcaggaggactctcagggaggggagagtcagctgcacagagtcagagccggagggcgtggctccaggacacagagggtggccacggggaggatgagatgccctctgctgatggggatgaaaggcatttgacttgggctgtgggggtcagctgcggactcctgtgggaccctcagcagagacgtcctaaaggctcccaacaagctggcgacacaaggatggtgccttggctgaaagccgagatcacctggccacggtggctgtccccagatctggctgcatgaggccccacgggcagctgttcacctacccggcagggagtgcctctcactggccagcagctgcaccagtgcccagaatgcatcttcctcaggcagataaaggagaaacaaggtggcaatgtggctcaggtccctgcagtagcccacctcctgcaagagccagaatcgccatggaaggacatcacctgggagggccgaggtcacctgggaggactcatgtcattggagagggcagaggtgactggggaggcttcctctgaagaggcttcctcaggatgcaaattcatttcatgacaagagccaagtccatcaggcacttcagcaccttgtccaaattgtctcctgagagcaccgtcctgcatgtgacactgccaagctcccaggctttggggcagccccaggaggagggtgtcatttcttgttctgagaagtgcccaggtgacaggcccaggtgacaccaggagtccaggccccaagtcctttgtgtctcagcttgaccccttgagaccacccccttgcttggaggtttatgccagcagtgacctggaatcctacctcctatatcctggtgggtcacaaatactaactttaaaagaagcaacgacacccccatcagacacccactcctgtgaatatggaaatatggcccaggaacctcactgccgggaatactcaccgggttatactctgaatatgccacaaggatgtagaatagttcccgctgcctaggaaacagagaaagggggctagggtttggtttgtgcagatgctgttagtttcactttgtctacaaatcctaaaaacaaatcccatttcaggttcagatgattcaccagataagcagtgaactttcagggcctgagattattgaagaaatgtttcagtaaaatccacatctgtgacatgcaaatagcccagttgtacagggagttgaccgatccttttcactctgaatgattttttttttttttcagtttgcacacacgccagttcagtctttgggtgtacagttcctccacggttccaaaccagtgtgcagagtctcccggccaccactccagcccctcctggagtgactcctgatctttcaaatctccagggtttcccctatgcacccagcctctccccgatccgtcagcccctggccacccagactgcttctcagtccctatggtttggtcttttccagaatggcctaggaatgggaatcctactgtggtagcttattgggtctggcttctttcccttagcaaaatgcatctaggatccacccacattcctgcgggcatcactggctcattcccttttctcactgggtcttctgtttgaaaggaggaccagactgtctctccccattcccgtgttgaaggccatccccgaaggcttcgtgtgtgactgatgaggaatcaagcagtgaacgtggcatgcaggtttcatgtggatgtcagttttcaaatcagtgggttcaatatctgtgacaccttggggacgtgtggttcaagtccattgagctttgtgagccactgcccaactggctgccaacgtggctgtgccatgtcatattcccagcagacctggatgagagtttccaggacccctaattctcccagcatttggtgctgtcagtgttgcctggggaggctcatgggctctccatcctgccaccctcccgtgggtcctaccatgggtccccgtgggtcagggagagcacctttcaccattatgcatgattttgtttgctgtcttctgtctcctcaggatcctcctgggttctggccccacatgttccagcctggcccagggcttggaaccagggaggtgcttggttcatggtgccggctgctccctgggctaggagagctcttggcagctctgtcatccctcctgggtgatcctggcttctgctctgggaaagtccccatccctctcattcaccccatctcctctgggaccctgtggctctcgtaggcttacttcactccatatcgatccctgaagaagacatggttctggagagtcctgctcacgtccagtttgatctggtggatgtgttcagaagacctcttgcccttctccttcatgatctgtagggcagggccaagaggaggaagcagcctcagaacagatggaagactccctgccccaaatggcagtcagcccacagtcagcgctttgggaaggaaggaaagaaggaaggtttccttgtgcagaaagctgctttttggcttgttactgaagccagggagggtcaccagagccgagttcatctgtggtgactatgtcaccatctgtgcccaggaagtgcatctgaccatcccccccacccccccaggctgggcttgacgttcactccagctggaggcctgggcccctgacacagcctgtcctgtttgttgtgctctggctgagcatacctagtattttttggggtgttttgacttgatttcctgaatgttcaggaggactgacaacaccaggccccggatgttcatgggaatgcccttatagatgcgatctatgagctgtgggcagaaaacaatctggtgtcacaggccatggggtgaccccagtgaggatcagagcccagggattctggaaatttttggttttggccccatgattcctcagtagaggtgagatcaagctgggacagggtctcccttcccaggactgaaagagtggatggacactcagagttgaaactgtgatccgaacctttttcttccttcaggtcaccagggcatccctagccttgagctccaggtggtcccagccctagattcagattccctcccagcaaggtgacgcttgcacgaataggcaggcaatctgacgaccaggcctgcagtcttctgtgcaaggacagtgtgccacccgccctctgagaggctgacggtgccaggccacagccatgggtgcctctcttctgtctctgcagagagtacttccggggcctctccctccacacattacctttttgctgtttttatatgactcgcatttgcccagcatttccagccacttgctctttctttttttctcctgccgaatttgctgccaaatgaggaatgttggagttagcggagctgccaggcttcccagagccgcccgtggatgctgggtcttgggctctggagccctggtgggacccagctggaaggagccagggaagggcagaccctaagggctgagagcctttgagcaaatgagcgccagtgggctggctttgggaccccaggatgtgccatccttaggccacagacacaccagtcttaggtcccagcctctaggtgggttcctgacacaagcgggcagccacccccaagccaggactgtggttctcactttggaattttatcaaactgccaaagttacagcaactggggtcaggtctctgctgcccctcccagtgacagcgtgttgccctcacccgccaccgcccaggccagctgcttcctctgcctcactgaccacccgcccagtccctacgtccctggaccagcccctccatgcatcaggctcttacctttgcctcccgtgcagtcacaggaggcagctccgtctcactgtaaggcaactcaggcagagctgaggacctgcacagggcctggagccacccaagcctgggagccgacccccagaaaggactggcactgtccctatccagctcagggctcagcccaggagaagtcacagggaagggaggacaaggaccttcctgtggggctgactcccaggaggggcaggacctgggagaaggagtgcagggacagcctggctggggttactggggccctggcatggggggtggtcaggctgcacaatggggctgcgcgtcctggactcaaggtggtgctttctgctggagctgagaaaggttagccctgagatgggatgggggccacccagggtgggcgaccgggccctgacaggagtccctcagggagtgaccacatcaccccgccagggtcaagggagcctgccctgagacctgcccggtgtactctgggtgcaccaggggcccatcccacttgacagccccaaggctcttgcaggttctgacctcccagcatccacctgcctctccctgcatctgagccacacaccctgcatttcagaagtggcacggctcatcagctccctcccaccctacctcccccgggatcctctgtctctgcatcctatgatccccgagggatgggctcctggctgggctcctcttacctggccccagatgccttcccagcaccagacccaggtctttagccacaagccctgctgcctctctggtctcaccatgagatgcccagagcggggccctgcccgtcttctcccccattctctttgggccaaagcccccactgtccccacacctttcccccttccccatggggacagtgagggctgtagttctagggaaatgggggaggacaggggcaggtgggctctgagagacctgctggacagcagccctgaggctgggccaggtgtctcctcaccctgtggccacaacccttggatctcactggggttgtctcctggtagacagggccagaacctcaggctgccccgctcctcttgtgctaacttgccgacagaactgctgagagcccaggggcctggcctagccccctctccattcccaccggctccctagatgggccttgcacctctggcctaacaacaatctcgggctggacctgcaggggagccagggaggagttctgaccctggaaaagaggttggcccgacctggtgagacatgtcctgcgtcagaaaggcctttctaaaagcaaacccatccctgagctgagacagctgctttaggggtgaggggagcacagaggactcactgcagaatcccaaagcgatcaacgctgctgtagattccaacaggttcaggccccttgtcctctggcagcccagctcggtgtccctgtaacccagagggagccttggtgaggggtccaaggtaaagggtgcaagggcctgggggtattggccacctgtccctgccctgtgctccgagggaacccaggaccctttgaccagggcgcacaggaaaaggcctccctccaaggagcagaccgaactgtaccttctgatacttcataattatgtcctcccgctcctatgcctgcacactatccgcgccctctaccatgtccatcctgtgagacaaagttgtctaaaggttacactgtacccgacagcttcagagaacccctgaactgctcccgctgggctcccagatgctggctggttgtataacctgcattccaccactgcgctctggtaaaaagggtccaaaccccgtggcccacacatccatgggtctctgcagtctgaagccctaagcaggggtgggcatcttcccaaggactcgagaagagtgggacctggacagagaatcccgttgtccccatatgccatgaaacgggcacacacctgccctggcaggttgaatggtgtccacctgccaagggtgaagagcctgtgatgggctattccagggatgtggatgtgaactgcggtcaggcaccagaggtctctgtacgatcggcctcctgggatgctcagggccacagagatgcccagtttcctatgaggaacaagatctctcctgattgctccgttctaccccgctcatcacttgggctaccatggcccttcagtctaaccagtgaagctgctttaagaataacgccatttgagcaggagtgtgtttggttttggggatgaaaatgatctactgtctccaaagcagccactgtgctcatggaaaccatgtctctcggggacggactgtggactccaccattctgagctgtccctacaggagggggcttcatgttcctgtgtcactgatgtagaagagtgggtccttgctcctggagaacatctagatggaccgtccctcctgataatactcagggcaaaaggaaagcgaggccagacagaataagaaatagttggggagaaccccagtgcccggacccctttgaacacaagggaagttagtctcccctcagccagtcctccagggctccttcactttccacaactgcccaagggcagaagcctccccatgccactcccagacaagggaccatgtgtgtccagtgggtcccacggtgaccatcaggacccagcttaggccccaggtgtgttctgaggacccttccctcctccccacccacagtggatccattccagtgtctctgccagggccaggctctgccccatcgggatcggaaatctgggcagatttgggatctagagcagggaggtctcagggttgaggcctgaagtctagcacggcacacagcagggctgagagcagaatccagggtcatgtctgattcccaggccggttaccgcctctctgaccccagatgtctcacctgtcgaatgggtacattcgggaacagcacccactctacgaagccaccatgaggacgaaagagaagggtcactgagcaggttttttcagctctgagcagctctcctttttcagctcttgccgcatctcggactttcccaatgacagccgtagcaagaagagataagaaacaagacaagttcatgttgtccagttttgaggtcttgaaagaagttgcaccagtatgagaatagtggatcagttttctctaggatccagaaagcatatcaggcagccttggggtgaggaaaggagcccggcctctccagcagccacacaggcctgcagtaggatggggttggggctggccatgtggatcacttgggcctcatgaggggaaaggaaataccagggggcagaggaggagcatgggggcagctggttgcctaaggagaaggcacctcagggaaggggactgtattcttttgttttcacactgctataaagaaatacctgagattgggtaatttataaaggaaacaggctttattgacttgcacttcaggaaacttgcaatcacggcagaaggtgaaagggaagcaggcaccttcttcacaagatggcaggagggagtgagtggagaaccagtaagtgccacattttgaaaccatcagctctcctgagaactacctcactatccggggagcagcacgggggaaactgtccccaaatccaatcccctcctaccaggttcctcccttgacacaggagaattacaattccagatgagatttgggtggggacacagagccaaacctgtgagggtctcagtctatcttgcagctcccctggggctgaggctgagtacagatctgctggcctcgccctatagcacgcgagggctctgccagtgcgcccccatctgctgcttcctagggatggtggtgacttcctcaaaaggagcatagatttgctctcctgctgcccctgcagggccttgtggagccccggccaagttctcccagggtaaggggaagaaacagggctccttgcccttcttgctacttgagtgacaaccctggagtcatccctaggccccgtcactgcccctgcttctaaactgagaacattttggcaaatcttcctggcagaggctgggggctcatccctgctatctgttctagcttggtaaagccgggttaagacacctgggcaagcagacagtagagtggaccccaggaagggtgggtggagggcgctggcctttgggcttccctggactagggtgggaagggggaagtttaccaggaaatagagctctcaggactatgtttaggaggaggtggtaatgctggtggggggatgtccattcatccatccattcatccattgtctccccccaccccccatctcggactgtccccatgacagtcctagcaagaagagacaagaaacaagacaagttcacgttgtccaattttgaggtcttggaagaagctgcaccagtatgagaatagtgggtcagttttctccaggatccagaaagtatatcaggcagccttggggtgaggaaaggagcccggcttctccagcagccacacaggcctgcagtaggatggggctggggctggtttggggtggaggataagtgacagccaaggtttgtcagcatgcagaggggtggctgactcatggactaggggctgcggagcccagtggttgcccttagttcttggatcctgggagacttctggagcctggatttggacagcctaggggtggaggtggtgaggggcaggggtggggcgggaggagaggccttgcatgacagggttcagggcaggaagccagccagggactgctttgcagtggctgttcccatccccattcccactcccaaacccacccctcccccaccctggtgcagggtcggctgtgggcaggtgtcttctgctttggcctcagcagatcccaagagggaagctggcagccacgtgggcatgtcacttgtgccagctttgtcctgcagtttctgcttcctggagtgtggggcacccacccaggagagcacgggcacaccccacacctctcgttttgagggtgctgggaggtgtgggacctaggtcctgcagccctgtgcttgtgccgtgaaaattagcctaggagtcccgtgtccgcccatccacgtggagccccaggagcctgaacagtggcatgcagcgagatgaggagggagagagaactggaaaaggagacagagagatgtggagcagggaatgagagagaggaagagacagaataagaaatactttgggagaagtatttcatccctctggggtgccatgactcctccctgctatggatggaggaaagtgactgatctgccggagacatgaaaccacatgatccttccttccacaataaactggagggtcaaaacaggcaagagtaggtccaggtcttctaaaagccatacctgaaatgtttccgataacagttgatttggtggtggtaactcaatcacacaaacaaccacaacaaaagacacaactatcagagattttcagatagcctcaaaaacaccatctaacattagggagttcaaaaaggcatgaagtttcaaaaaattgagctttatttacatatcatttgcataaactggtaatttaacagtatgaataaatcctagggcagaagacagtttggagaccccagggcacaagtgctgagtttggaagatttggtactgtaccctttgaagccctcgcctggtccccgcaccccttgcctgcctgttaagaagagcccgtaccagggagcaaatcaggggcaaatagcccagaagcccagtagtggacagacctccatgcctggaggaggaggccacctctgagagcaggaggagctgcccgaacccttcctcacagcctccttttcctgctctcaacacctccagcttgcagatagacagccccagcaccggcagaatgaaaaggtcctgaggcagcagggctgtggctctggtaaataaaagaggtctctctttagtaaggtagaggagctcagactgcacaccctggtctctgacaccaaggctcgctccatgcccaggactaggggcagcgtgggagctgctggctggggccatgctcgcaacctcttctctgccacgtctatctccagcgatgctctcagctccagggctgagcccagtggctacggcaggtggcatgaggtctggcagcttgtcgctttgctggtctttggctgtatcggtgcagggcccggaggactctggagctacctctagctgcagcactgcctctggatggggacttccccatgctgtgggctgtggctccatagcgggcactggaagttcctctctctctgcacgtgcggcaagagctgaaaaaggagaaagggtcactgagcaggttttctgtgtctgagccccagagttcaatctctgctgaccagacccccactgaccagaccgctgagcggtggtgctcagagtcccctaccaatggctcttctcagtccacagacctctccctcccctcatcagcacccacaggtgactgagagtcttctcgggactggaccccaactccaggacacagggaggggcagtttgtcccaggctccgggtgctgagcttcacgcttgtgccacaaggtcctctgggccatctcaaacggggcagtgatgtggcctcgcacatctggatgcactgtctgggcctattcctgggccacatagccagaggaacaggaagatgtttgtcaacccaggcaccccactctgctgggtctcccagggtccttaccatggagaccagatccagagacagcacagaggccgcagggtgaccggcccagaacccttgagactaggctggggatgacaggaggactgtccccagacaaccagaagaccctttgctagtttcttggtacttcatttctcgcctgctaccgttaccccaccagaaatccccttcatgcagagtcaatgaggagaggaagacggacacagaatctgtggaaagaaagaaaacaaaagatgggtggggagaagagttgggagtgtaacgttgtaagagtcctacactatgcgtattatttgagggttggctgtgattaattaaaggtgtgtcttgtagacaaccattaacacactataaataaattttatatatatatatatatatatatatatatatatatatatatatatatggagagagagacagagacagggtcttgctctgtcacctgggctgaagtgcagtggcccaaacacagctcactacagccttgacttcccaggctcaagcaatcctcccacctcagcctcctgaatagctgggactacatgtgtgggcccccatgcctggctgcttttgaaatggtttcttgtagagacagttatctcactgtgttatccaggttgatctggacctcctgcccccaagcaatcctccagcctcggcctctcaaagtgttgggattacaggcatgagccactgcactcggcttacacatgtttttaagaggcgtaaatgctccctctccctctccctctccctctccctctccctctccctctccctctccctctccctctccctctccctctccctctccctctccctctccctctccctctccctctccctctccctctccctctccctctccctctccctctcccgtctcccgtctcccgtctcccgtctcccgtctcccgtctcccgtctcccgtctgccgtctccctctccgtctcccgtctcccactttccatggtctccctctgatgcccagctgaggctggactgtactgccgccatctcggctcactgcaacctccctgcctgattctcctgcctcagcctgcccagtgcctgggattgcaggcgcgcgccgccacgcctgactggtttttgtattttttggtggagacagggtttcgccgtgttggcctggctggtctccagctcctgaccgcgagtgatctgcccgcctgggcctcctgaggtgccgggattgcagacggagtctgggaagtgaggagcgcctcttccaggccatgccgtctaggaagtgaggagcgtctctgcccggccgcccatcgtctgagatgtggagagcgcctctgccccgacaccccttctgggatgtgaggagcgcctctgcccagccgcgaccccgtctgggatctgaggagtgtctctgcccgaccgccaccccgtctgggaggtgaggagcgtctctgcccggccgccccgtctgggaagtgaggagcccctctgcccggccgccaccccatctgggaggtgtacccaacagctcattgagaacgggccatgatgacgatggcggttttgtctaacagaaaagggggaaatgggaaaagaaagagagatcagattgttactgtgtctgtgtagaaagaagtagacataggaactccattttgttctgtaccaagaaaatttcttctgccttgggatgctgttaatctataaccttacccccaaccccctgctctctgaaacatgtgctgtgtcaactcagggttaaatggattaagggcagtgcaagatgtgctttgttaaacagatgcttgaaggcagcatgctcgttaagagtcatcactactccctaatctcaagtacccagggacacaaactgcggaaggccgcagggtcctctgcctaggaaaaccagagacccttgttcacgtgtttatctgctgaccttccctccactattgtcctatgaccctgccaaatcccactctccgagaaacacccaagaatgatcaataaatactaaaaaaaaaaaaaaaaagaaacatcatgttgtacatcataaatacatacaacaaaaataaatattaaaaaaaaaagaggcgtaaatacgaaggttagtgttgccatgaagtcaggcaggggtggtcaaactatggcccacaatccagatgaagcccccctcctattgtgaataaaggtttattggagccacagttcctcccctgtgttcgcttcttgtctggggctgctttggggctgcagtggcgaagctgagtaactgctgagtaggtgcaacaaagaccacagggtccacgaagcccaagatgcttactaccaggtcctttgcagaaaaatcttgctgagccctggggagggaccaggtggcaccagggaggccattggggaggctggtacagtaatccaggtgaaaaatgatgggagctcagattaaagtggtcatgacaaatggctggaatcaggatatattttgagggtatgaccaacaatatatggataaaatggacagtatttagagtttcagattttctttctgccaaaggatccctttcttaaacaaaaaaattatacaaaagatcaattaaaaaactgaccaggccaggcgcggtggctcacacctgtaatcccagcactttgggaggccgaggcgggcagatcatgaggtcaggagattgagaccatcctggctaacatggcgaaaccccgtctctactaaaaatacaaaaaaaaaattagccatgcgtggtggtgggcacttgtagtcccagctacttgggaggctgaggcagaagaatggcatgaacccaggaggtggagcttgcagtgagcagagatcaggccactgcactccagcctgggcgacaaagcaaggctctgtctcaaaaaaaaaaaaaaaaaattaaccaaaaatcatgtcaacaagattatttgtgtgattgaagctggggttgagcctaggcaccctaacaccttttcagcacccctaacaccccggctgttccagaggcaccctatagagccccttgggttcagatgagcagaacttgaaaccacagatcggaaggaatagaaatctgcgtatctttcacacaagccataacattctaagctgcatctttgcagcacactgacatggggctacttcacccacagccagcaagcgtctgcaccagtgccgggatttgtgtccaccgttataagaaggcagctgcttgcatgaggcatggcggtgaggaaacaatgccacccggatttcaccattggctgtgtggactggctgtaccatgggccagatgcatgtcttgggcagacactttttagatgccaacttgcctgtagacaaagatgacgcagaggtggcctcggggatggcctatgtgatgggttgaatttgtcccctgaaattcctatgctgatgtccttagccccaatgcctgagaatgtgatcttatttggagatagcgtcttatagaaataagttaacatgaaaaatgagatcagtagggggtgcccaattcaatatgactgatatccttataaaagggcaaatttggacacagagacatgcatagagggaagacgaggtgaagagacaccgggaaggccacctacacgccaggagagagacctggaacagagccttcctgcaccgccctggaaagggaccttccctgccgacaccttgatcttggacctacagcctccaggactgtgagacagtgagattctgttgctgaagctgcccagtatgtggtactttaaggaagccctagcaaaccaatgcagcctggtagcccacagctggtgaaaagatggaatgagcaatggagactcaggcttcctgtctatacttcccaaagtgcactatgggatcttttgctgggtgtaggtttgcaagataattttggccggggttgggacggtggggtgcagggtgcataatttcagtgtatattatcatatgtttatcttactgtgtaaatgcttgtaagaacagttaaccaacaaagtttatatgctactcaagatacaggtttaaatgctctcaatgcaaatgaaaacactgtcctgctgtggtccagggaatcttgatctttccttcagagagacttgcagctttgagcaggagctgccctttccttgctgcctactgcatgctcccacaacacacatgcacacacacatgcctttgcacacagctggacacacgcatactgtgcttcatgccctcattaaggaggcacagaagggaatgtatctgttaggaaatgaagacggctcaactccctggttccctgggtgtttgcacaggtgccctctgtgcagaccattctttggtctctttcttcttttagtgaagggagaagcagagccccagtgggtacccggctactttgggcccaagccaaggtcacaagcttccttgggagcctggtgagatgggggcaccactggtcctcccaaaccgagggggcagcattcagtggagccgtgagcccaggaaggtgatagacaggatgactcagttcattagaaacaaccaaaatccagtgaggaagggcagccctcaaaggttttattctccaggaggaaggactctcaggggctgcgagcagcaggcacgagggctttattgcacctgcagttaggtgatggtgacctacaactgcaccggaaactgggacccagagtgccccgacctcctgctctgtctctctctccctctctccctttctccccccctctctccctttctccccctctgcctctctggcttctctgtctctcttgtcatctcttgcccctttccccatctctctttctctctgctctctccatcctcctctccctctcagcctcctctgtctctcccccatctctttccacccatcttttgctttctacctctctcttccctctccccatctcttttctccctttctctctccccactcctctccctcctcaccctcgttcatgctccctgatccccatcctacactgctgctaaggcaatgccaaggctactgtcctgtcacggtgtccctacttccagcatccacacatgaaaagatgctcaatgtcattagtcattagggaaatgcaaatcaaaaccacaatgagacatcattttatactcattaggatgctattatcaaacaaatggaaaatagccagtgttggagatgtgaaggaagtggaaccctcacacattgctcatgggaatgtataatgcagtggctcatgggaatgtataatgtataatgtggaaaagtttggcagttcctcaaaaagtcaaacataaaactaccatatgacccagcaattccactcctaagtagatgtccaaaacccctgacagcagggttgcaaacaggtacttgaactcaggaacggaaaaccaaacatcatatgttctcactgatatgtgggagcaaaactatgaggatgcaaaggcataagaatgatacaatggacattggggacttggggggaagattggaaggtgggggcgagggataaaagacaacaaatatggtgcagtgtatactgttctggtgatgagtgcaccaaaatctcagaaatcaccactaaagaacttattcatgtagccaaataccacctgtaccccaataacttatcaaaaaataaaacacaatttttaaaaaaacagatacttgtgtcccaacattcagagcagcatattcacaatagccaaaaggtagaaacagcccaattgttcatcaacagaagaataaatgagcaacatgtattatatgtgcacagggggatactattcagttattaaaatgaatggaatacttatacttcctgcaaatatggatggactttgaagatttgcaattcaaatctaatgaatagacagggccgagcataatggcttatccctttaatgccaggactttgggaggctgaggtaggaggatcacttgagcccaggagtttgagatcagcctgggcaacatagcaagacctcatctgtacaaaaaaattgtttaaatgccaggcatggtggtgtaggcctgtattcttggctactggcagggctgtggagggagtctcgcttgggttcaggaggttgaggctgcggtgcactaggataccaccactgcaatccaacatggggaagagagcaagatccctctctaaacataaaaattataaaaataacacacaaaatggctcagcacggtggctcattcctgtaatcccaacactttgggagaccaaggtgggtggatcacgaggtcaagagatggagaccatcctggccaatgtgatgaaactctgtctctactaaaaatacaaaaattagctgggtgtggtggttcctgtgtgtagtcccagctactcaggagactcaggcaggagaatcgcttgaacccgggaggcaaaggtggcagtgagctgagatcatgccactgcactccagcctggtgacagagcaagactccatctcaaaataataaaaacaaaaacaagtaagtgtgtgtctgtgcccatgcctccgagcaagttcgtgtcagcatgcatagctgtgttgtgtccaggtgagtaggcacatgtgcatgtgtgcgagtgttggatgctggggcagtcagggttagagtcactcacagtcagcacctgctcttcacttcctcatgcctggttcctacaggcccccacaagaagcatgtagggcccaagcaccccttgccacctcttaaccccaagcacaggcatgagagggtgagggtggccgactgcagggcccaggcttggaggaccctggagctgactcctggtgcacatgccacaaccgccagcctgccctggcctggctcctgggaaacacttgcccttggccagctggagaggtgttgatttgggacacagccccacagtgatcaccactttatcccacccccaaatacttcctaaggccatttattgctaggagatgggcacaggcagcctgctgtgatgacttcctagacacaggctctggggacaggaagcccatctggcccccttcctatgacatggctgggaggcaggaggtgggcctcgggtaagaaggatagataagggcagcttgggcaggttggggtgatcagacccaacatcaggccatgggggcttcgaagtccagcggagtcataggaatgagaaaagacaggaaataaagtgggaccagggggccaacactagtatggaggctgcaaaggccctgagctctgggagcccaggctatttactggtgctcaaacaaagaaacacatggtgaggatgtgggggtttaaaggaagcaatgtatcaagtgagtgagctacagctgcgatggtgtagcattttctttgaaacatgtggctacttgagataatgggagtgctagaagcaagagctagcaagtctagcagacatgcaagccctgcctcagcttctctcccaacactcagcttttctcccaaaaggacagaggaagcagcagtaagtctcagagcctcaggaccagaggggccccagtgccccttggtcaggatgctgagcccagagagggcaagatcctgacttgaggtcacagagcagcaatccctggcagaactagcattccttttggagaaattcagagttcatggtccccaggagtcattcatttactcatgcattcattcggcaattacatatggagcctctactatatgccaggcccacttctagccccagcatacagcagtggacaagacaaaccaatccccacctcaaggagctgatgctctggtcacagagacagaaaacaagtgaagaagatcacattacatgatgctaaaggctagcaaataaaattacaccacatggaatgttggagtcactctgtccaaatggtggccactagccccatatggctatttgagtttcaagcaattggagtaattgaaaattaagagtttagcggccgggcacggtggctcacatctgtaatcccagcactttgggaggccgaggcaggcggatcacgaggtcaggagatgaagaccatcctggctaacatggtgaaaccccgcctctactaaaaatacaaaaaattagccaggcgtggtggcgggcacctgtaatcctagcaactcaggaggctgaggcaggagaatgggagagattgagaccatcctggctaacacgatgaaaccccatctctactaaaaatacaaaaaaattagctgggggtggtggcaggcacctgtaatctcagctactcgggaggccgaggcaagagaatggcatgaacctgggaggcagagcttgcagtgagatgagatcatgccactgcactccagcctgggcaacagagcgagactccatctcaaaaaaaaaaaaaaaaagagtttagcggacctgcagccgtgcttggagtttgcagacgctgcgtcactgtcaccactaccttgctcccatccccgctgcagccaggggcatgctcagtcaccccgggcagtgtccccgctgtggccctgtggcaatggccaccaaggttgacaaagaggcttgctgggaggcctacaacctggcgcgagatgacggcttggccgtcatctgggtgacttttaaatatgacggctccaccatcgtccgtatcgggcaaggagtggaataccagcacttcatcccacagtgcacagatgagatctggttgcttgccttcgtgtgcgtcaccacgagggatgccaccctcatcaggtggatcggcgagaatgtcaagaccctggtgaaggaggtcatacaggatttcactaaggagtttgtgatcagtgatcagaaggagctggagggagatgtaatgaaaagtgaactgaagaagactccaggtggagtaaccccagcttccccactgccccttgccaaagtcatctgtctactccccggggaaggggccctcaggcctcagctaccaacccaccagcccaccagggagaaaagaatccatgagaggcagtgcccgccaccctgtgtccacagcccccaccttcctgcttcccttagaacactgctgtgtcttatctcatgaagcttgtggaacccctttctttgatttttttcttttctccccctctcttttgttctaaagaaaaattattttgatgcaaggtcctgcctgtcatcagatccgaggtgcctcctgcggtaaccccttttcctggcatttctcttacatataatgaggctgcctagtgggatctgtgcaacctcatgttgcttctggagcctagatttgttttgccatctcagttttcttgggccccccttcctgtttaccactgaggggcagctgggccaggagtggcacctggtgattgcagccttcataagcacacaagtccattcctgtagtcagtcccagacctcctggagtctgccccgggctccctcatcccaccttcatccagagttgcctaagttgcatctccagcaaacgcaggattgctcagtggtgagaaagttaggtctggctctgatcgaataagagataaaatttgccttaaaacttgcctggccgggtggatcacctgaggtcaggagttcgagaccaccctgaccaacatggtgaaaccccatttctactaaaaatacaaaaatgagccagacatggtggtgggtgcctgtaatcccagctactagggaggctgaggcaggagaatcactagaacccaggaggcggaggtagcactgagccgagattgcgccattacactctagcctggggacagggagagattctgtctgaaaaaaaaaaaaaaaaaacaaccttgcctggcagtggctttgcggcagggtctgaaagcacccgttcccaccctcttgactgaaatgtcctagtgacacagagaagggcaaaggtctgggcccagagttgacagagggactatttcagggttcacttcagggcctcccaaagcaatgagggtgttagggagagaggcccagggtggggactgggaattcaaggagagctgggaactgatcacttaggttcaggaagcttctgtacaagcagtaaggatggcttgggccagagggctactccccctgtggtgctagcggtgagcaaagccctgggctcacggcaccgctaaagctcatggcttcaatcctacacctgcaccacacattcaaaaggatcgttttttgttgtttgtttgtttttgttttttcaggcagagtttcactcttgttgccctggctggagtgcagtggtactatctcggctcaccggaacctccacctcccaggttcaggccattctcctgcctcagcctcctgagcagctgggattacaggtgcccaccaccacgtctggctaatttttgtatttttagtagagacggggtttctccatgtttgtcaggctagtctcaaactcctgacctcgtgatccgcccacctcagcctcctaaactgctgggattacaggagtgagccaccgtgcccagcctgttttgtttttaaagaaagatgagattgtcttggttcttcatgagaaaattttatatagctctttttctttttttccttgctcatttcattttggaaaagaaatctgtactgtattgggattacgaagaacatctctgcactcaaacagcttaagaaagaaattttgtttttcaaaaaaaaaatgaaaagaagaaaattaagagttcagttcttccatcgcaatagccacatttcaggggcttgttagccgcacggggtggctgctgtgtttgacagcggacggggagcatttccatcactgaaggaaccaccggacagggctggtgtggggagtgcacagagggctgggggctggatggccgaggacagcgacatctgggctgtcctgctgagaaggggtggccacatggcgacacaccaggaggaggggacagcaggttcaatgttggccagatggggatgtgcttgatgtgttcaaaggacagaaaagacagacggagcaaggggagaggagagcaaggtggggctggggaggtcagcgggggggcctctggggcctgggtaaacagttttctgctttacgtggaaggcgtcaggaagccatggggagaggggttaagcaggggagttgcatagtttgaacaatatatgaagaatggatttgtgggggcaagagtggaaggaaggagccctagggaggaggctattgtgtcacagagaggaaggtgactgagacccgggtgatacgggggatggggaacagccatagcacaagcctcagggttctggatccagctgtgcctgaagttgatcccccctctcctccctttctcctcttggttactgggcactgactgaaacacccctcattactaccacccacctatcccctccctcacaaaacacctgactgtctctcctcctgtctctgtgcagagcactcagaagggacctaggcttccctcagtgccctgggtccaatttcttttcagaacttttcccccctgactgcatcccagggctgataagatagccctgtctagtcaccttggagtcctgggaagataccttaggccacctggtgtttcacttactttccccaccaggacgatttcctggagctgtgagcaggaggcaggaggaaccagctggctctgggtctgggaggtggaggcaatgaaaagagaaggctcagcttcagttgcaaccgttgggactttggttttctcttaggaagaacttcccctctataaaagggccgatgccatcctcgtgcattcgcagcggaggggatctcctagggtcctaagaataaggtggaaaacctgctccctagggtgggtaccgagaggccagctctgctcctccaaagctgggcactcattctccctcaggacctttgcagctgcagttccctctgccaagaccccaggtggctcctccatctcgctccaaagtctcctcctgagtggcgttgtggattgcctgatgagcacggctccctcctcggaagcaccttgtctgtctcctgtactagaacgccagctccacaagggcagggcggttgttgatcttgtttctctctgtcccttcctgtctgacactgtgcctggcacatggtggatgttcccaggaggtttctggaatgagcagatgtctggggtgagtgtgggcaggtggctgccatgcatacagagcctgccaggccctagtgggctcagactcaccctctcactgcaccctcccaatggggatcaggactttgaggcttagagaggtgaggtcactcacccaaatggcacagccagtatgtggtggccctggtctggagaggcctggaggggacttgggggggttggaggctgggccagggcctgtggacacgctgcctttccacatgacagctgtccacccatccacaggccctgcttcccctgccaagtcccacctggggcttccctggccaccttaggtcctcaggtacaattgcactgcagggcactggcctgtggcacacagaagcgggccctgcagcccagattcacacagcaagtgaatgaggcatagctgaaaaccgtgcgtatggtggcctcagccgggccacactgggtagaccctgacttgggcaggcatgtggctccacccatcactgggccggcagccctgcctcctgagtgcacctgctacacccagggcttgcaccagctttggggacaggggccgcctctccaaagaatgcagctcattgtcagcgatggggcaggattccttcccgatggccgcacccagcgggggatctgtccagatggacaagggcagctgagtgaggtgcctgaggaaagctgaccccctccatcctgtgatggatcctacctgtgtccaccccatcctgtctgactgcttcagctcactctgtctgtcccagccagtctggagccacacttccttgcagctctgtggctccttccaactgcacggccttccctgggccacttcccctgcctagaaggctttttgctcattgtttccatttctgcttggtcttggttacgtggtcttggttggaggatggtctctctgatcgacacccctgcgtgtgggaccctctccctgtggcctccatgttcaaaatgttcattctcacctgcctcagggcctttgcacttgccatgccccaacccaagctagtctttccaggccactgcctctgagccaccttcccacttccctaaacaggctcctctgtccttggcctgcagggcagttatggttgcctttgcatgtggagtcggtgctcactatggcacagccctgcctgtaagctggggaatccagccattgaggagtgcttgccaaaagaatgaacgagcattatgattcagaaagggcctggacccacatgtgtcccccaacacagtgtgtgacctgagatgacagctccccctctgcactgcatctcctctgtccactgtggtggtaggtccccaagatccccaagggtcctgctggccctcacctttgaagctctgggacacaattatcaagggagaccactgcctacactcccagagctgagagcacaaacaagctcttaaatcaatcagcgacatcaccttccaagtgaagaaaacaggacctctggcctagacacaaggacaggggagaggaggctgcaaacatccctgagtgagctggctaggaagggtcactagttgcctggacctggaagttgaggaacccacagagaaaagcagggaatctcagctggaagatggggacgatatcaactcagaccctcagactcaacctggtgagggagagtggatatatcaagactccttacaccaccaaaatcaactctggctaagtccagccaaggcaaagcaagcaaggaatgtgccgggagattataggttagctcacagaaacaaaagaagaagtaaaaaaccatatactggaaaggactgctttggatatgaaatttaggtagccaaactaatgggaagcccttggatgaatgaaatccctctgcttccatcctcaagtcactctactcaagatccaaatttccttaatatataaagagttcctacagtcaataagacaaatgaaactgcaatcgaaaatatgaaatagaaaaaatgtccacgagtatagacatgaacagatagttcacagagcaggaagtagaaatggcccttgagctgataaacaatgtttagcctaatttataaccagagaagtgcaaatggaaactatagttcaagcccatttttcacttatcacattggcaattatccaaaactgtgataacactgtgtcaccgtgggtgtgggagacaagctctctcctgcattactggtgggagtataaactggtaaggccactatcaacattttttttaatgcacatgccttttgatctgaaaacttactcctagaaatgtacagggacacttgcaaatgtgctgatggccctagtacaaagatatttattgtggtgtgtttctcttgtaatagcaagattggaaacaatctaaatacccatcaatagaggttggtgagctccataataatgtagccactcagtgaactctgcaacggtgaaaaagaagaatgaggtagctttacatactgcagcctggaatgatcttccagatagactatcccatgaaaaagcatggtgcatgcatatttgtgaaagcctccatttctggtctctgaattcagaacgctcacctttgtcttgtgtggctactgtccactctccaccggcaggtcacagaagtgtgacccctcgcacctttctatgtgcccctttcctggcctgaatggccttggtttccaactgtccacacctatgactctttgcagcaagactgtcatcaggctattggagccccttggtcctttctgcagagagctggaaaagtccccctgccgcaggatggcccttcactaatgactgacatgtgtatccttagctcaggctgggaaacggagatgtgactccactccacagtccacagagggacctgcttctgtaggattttgcctggggccacagccttgcatggcttttcccctctctgtctgctacccccgttcccttaccgctctccttgggtgccgtccttcatcagtcactgccatacaaatcaggatctacttctggggaacgtgacccagatagctgcccccttaccctgctccttgctttttgcaggtagggtgtgcctgtgtatgcatgtgtatgatgcaacatgggcaccatggttcttcccgtttcacaggtgggggacctagagctccacggctcgccttaggtcccaggtaggaagtggcaagcgactttgaagccaagtagtctggctccaaggccaaactcacatccactgttatatagaaaatagcctagagaaggaaagctccaagtgcaaggaaaatccgcattatcaaagcaggctaagcagggaagaccatttattttcccaaaagattctattctgtggtcttcccttcataaacacacatcccactgtcagatgcaaatcctagagctagaaatggggcattcaaggtagacggagctcctaggaacagcacgtttgcagagatgggaagtgaccctcccactggttttggtttctccatggctacaggcaaagcctgcctgctctgcatccggggatcttggtcaggtgttggaatcggtgggtggattgccggtacatttgcactgtgtcctagagagcctctatgcatttcaactctgattctccttcaccatctacgtgcagcccacaaccgcaggaccccgcccctggccctgaatctcccatgtcctggcgccaagcaggcgagtcagcctaggaggaggcagggctcccggaagccaagcccatgctgggatggtgagaaacaactttcctatgcaaggaggtgcctgagcacccgctgatgatcaagccggagccccctcacctccccgaagtgtggtgaaggaaagacaggccggaaagaggtggcagtcttcacctgctgtggttgagtttctcactcatgccaagttttacataagctggggaccatgtgcttcaaggctagaggtcttggcgggcccagggccttggatgggcctggatgaccaaggggtctgagacttaggccctggctctgcatggggaatcttgggaaggttggaagcccacggcccctactgagaaaggagccacggtccagatcttttgcacaaatcccacctgtgctccttgaccgcccctccccaccggggccatggtgaccacgcaggcagaagcctccatccgttcacaggaccagcatcctgggaggaccctggcctgagcgagctgctgcaggggaccctcaggctggatggttggccactcggcacccttttctctgtggagcagggatgacatttgagagccaccaaagatgggctggaaaaacaaaggccaccacaaaggaagctgaaggcagaaagagatgcagagaaagtgggagaaactcggctgtgctttgtgggggccctgcagggacatcggctcctgaagggatgagagaaagggtcccctgaactttgacactctgttcttctcaaggcctggccagccctgtggctccttagaggaatctgggtgccttctgtccctagtacctgacaagccccaggtgagaagacctgagctcacctgcgctgccacgtgtaacctgatggccccggcaccctcgcagggtttgaatagctgccctttccacctgtttcccagattttccacaccacccagaggctcatattcaaccccacagcctacaagtcagccaggggcctttggccacatgtactgatgatgagaatcactggattgtaagctgtaaaagcgcaaggatggtgttttgttccccgctaccccctgcacctgaggcccagcgaggattgctgctcggatgaaggagagcgagtgttcgtggagctctttgcagaagccacgggaagcccttcctgtgccttctcgggtttagttctcagacagccccactttccagatgaggaaacggaggctaagaaaggagaataaacttgtccagaatcagtggtgaggctggtatttgaaccccatcctgttggactcaacacttcctctgaaaagacaggataagggagctgcctacttctggctttgggaaccggcagagaggagcagagttgggccagacgcgtcacctcccaagctctgcggcacccaagggttcccagggtcctcttcctccgtttggctcttttcttctctggactctcccaccttcgaggattggactccttgcagggagcgcaaagcagagaacagaggaggcccatctgaggagagtgtgctggagcagatggggcacacagagagcccccaaacctgagcctcacctggagagtggctccctgcaagctgagcccctgtgtgcccagaagtgacataggcattcaggaaagggactgagggaggaaagaaggagccattcctcttcccaggggcgcctgccctgggttcctgagggaggctccatgtttacatctccaaaggccagtcccaaacacgccagagtgcaatgccctccctcagacccagggccatcctcggagcagccgggaggcagcctgtccactcttaccgcaggcaggtcacccaggcagcctcctcttagagctcctgaattctggagcatcaaatagaaatgtgaaaaacaggctgggcatggtggctcacacctgtaatcccagcactttgggaggctgaggtgggcagatcatttgagatcaggattttgagaccaacctggccaacacagtgagaccctgtctctactaaaaatacaagtaaataagccaagcatggtggtccacacctgcagtcccagttacctgggaggctgaggcaggagaatcatttgcatccaggagatagaagttgcagtgagctgagatcgcgccgctgcactccagcctgggtgacagagtgagactccgtgtaaaaaaaaaaaatgagagagaaaattaatgtgacaaaatgttaacaatgggtgaatgtaggtaagagtatgtggcagggtgttttttcttcttgcaaattttgtgtaggtttgacgttacctcagaatagcaaatataagaatgattcctgcagacacacgagtgatttcagctgttcacagggctcaggcaggaagcagatctcttgccctccctctgatccaggtcacttagtccagtccctgaaagcagtggatggacaaccatgccaccctctttcttccaatacaccttattttgtatcctgccctttttgtgtagcattagatcatgagcattttcctctgctataaatgtcccctcaaatatgttgtttcttgtgactccctagtgttctacccatgatttcctcagctgctccaccttggtggaattcagtgattcttctgccttttcaccattgtaagtgatgctttgatgaacagctttgtaggttcatctgtgctgcacctctgaccagtctcttctggaagagtctaaggaaggagacagaggcatggaccactggcttttgaaggcattcggtgggtcctgccacgccgccttccagcattccagaaaggtggtcccagtgaacaactcaccagggcggggccccactccacggcaccccagcaaggccagcattcgagaccagcctgaccaacatggtgaaaccccgtgtctactaaaaatgcaaaaattagccgggcatggtggcgggtgcctacaatctcagctgctcaggagactgaggcaggagaattgctggaacctgggaggtggaggctgcagtgagccgagatcactccattgcactccagcccaggtgacaacagtgagactgcatctcaaaaaaaaaaaaaaattagaataatcttgtacatgttattaactttaattttgcatgtaactttcttaaaatgattaaacttttctcagcatattctcatcattaaatattatttaaaacattattttaaggttagatagtattttatcatataaataattcatatttactagtcccctgttgttgaacatatatgtattattgaacctttatgttctttccagtctttcaatattcaaatactttttcatctctttcttattacttacttaggaaaaatttctagatgtggaattactgagtcagaggataaatattttaaagacttctaacatattcagccagattgcccttcagaaatattataccaatttgttccagcagtcatgagaacacgcacttccctgagctcttgccagcacttgatattatattgttattgccttccaatctgttaatcgtttctttttccttctttttaccctttttgcttggaaatatcttccctagcccaagatcaaataaacgataacttttctcatttaaaaaaataattatttaatcagtctagaatttggtttttgatataagaatcgtgatgattttatgatattctgcccaccaaccagagcagtgctggagaggtgcagagatggcctcctgtttcctgtttcctccaagttctgggtctgtgatttagggatctgctgctgagagaggttcaaaacatcttccccaccttatttcatggactgtcattgtttcaagaagcaaattataccatcagctccaggaagattttctccactgcttcatctgttttaagatcagtccactgcaacctgattctgcattctgccatctgatgggcttcgtggtgggtcatgtgaggagtttctatttttgtctgtgttctaaatttgcaggtattttattgaaagtataaaagtaattttaatagaagttactagccaggctttgcattaggttttaatatcttgtagaataagaataagattactttctctttttttgctttaagattcctcattacacttttttttttttttttttccttgggacggagtctcgctctgtcacccaggctggagtgcagtggcaccatctcagcccactgcaagctctgcctcccgggttcacgccattctcctgcctcagcctcctgagtagctgggactacaggcacccgccaccatgcccctcctcccaaagtgctgggattacaggcgtgagccactgcgcccggcctagattcctcattactcttttgcattatgtttaatctcccatgtggccctttttgaagttcttccctagtcactcatctctctcttttattatatttatatatttattatatttatttatttattattttgattgacatttgcattatatgtattaacgagaagtaattttgcatctgaaaaatgtcttattttttcctcatcataaaattacatgttcattacagaagatttagaaaatacagaaaagtataaaaaagaaaagtattacctttaatcttaccacttggaggaaaaaaactgcaaacattttgctgtctgtcctttcagattttttcttagtttatacatgtttgagcatgcataaaacttgcattgatatgattatgatatttcatcttcctatccagaagaatagagtatgtctttccacattccattacaaagaaccagttggattcatttatttattccactgttaatctgttttgattaattcttgtatcctacttcttggacatttctttgatttctcactagtttcttgagtaaaattgtttgttcgtttcactttcttctttcttgattgataatgaaagcatttaaagatatgaatttgacttttcttatggctttggctaaatagagacaataaaatctagaaacttctgaaataaattaaacctaatttagagaaaaaaggaaagtgtacattttccatagagtacaaggcacaacataaatgtttaaaattaagctgttattaatattataaaatcaagttactattcatgtatcgatatcttattgcatgctagctagaattatcaaatactaacagcaggacaaaaaagtcctcactagtaattttaggtgagagtttgaggtaaagatgtgggcatgatatcatatagggttgctttcatatctatcaagaccttaggtctgtgattttgtgctttcttatatgcacagaaactgatttgtaattgcagtgaacttgtaacatactaatcctcctgcctttttacattaccatagaaaacgcgaaacccaaacctcctaatcaaactgatagcttcttttatctctacctcagaatatcaactataatgatatatataattttgggtctgccacaggggcagagtcctcatggagaacctctgctagagcagggtagaagtgaaatgtggggttggagcccccatacagggtctccgctggggcactgcctagcagagctgtgagaagagggccaccatcctccagactcccgaatggtagatccatcaacagctgtaccatgtgcctggaaaagctgcagtcactcaatgccagcctgtaaaaacagcagtgccgcagggacagagctgcccaagaccttgggagcacacatcagaatgccctggatgtgagatatggagtcaaaggagataatgttggagctttaagatttaatgactcccctaccagattctggacttgcatgaggcccattggcccctttgttttggccaatttctcccgtttggaatgggaacatttacccaatgcctgtacctgtacccgcattgcatcttggaagtcactaacttgcttttgattttacaggctcgtaagtggaagggacttgccttgtctcagatgagactttgaacttggacttttgggttaatgctggaatgagttaagactttgggggactgttgggaaggcataattggttttgaaatgtgaaaagggcatgagatttgggagggaccagtgtcagaatgatatggtttggctctgtgtccccacccaaatctcatcttgaattttaatccccatgtgtcaagggagggacctggtgggaggtgattggatcatgggggtggtttgccccatgctcttctcatgatagtaagtgagttttcatgaggtctgatggattcataagtggcagtttcccctgctctcccctctctcctgctgccttgtgaagaaattgcctgcttcccctttgccttccatcatgattgtaagtttcctgaggccttcgcagccatgcagaactgtgagccaattaaacctcttttgcttatatatcacccagtctcaggtattctttagagcagtgtgaaaatgaactagtatacgtgaattcaaatgataatacttaagagactcatgtccaaaagataacaggagcagttttagaacaaaactataatgaaggatctaaagtgctgtactgggttctcttgacttacccagtgtgcaatgttatgaccttgggcaggcccctttacactgtgcaacgtgggattcaaatgcgatggtggatggaaccttgtcctgaacctaattccatgggaagcatttaacatttcatcatgacatatgtttgttgtaggcatttggtacataccttttattacctcatggaagtattctgctaagaggggtctggtttgtttgtggtttttggtttgtttgcttgcttgttttttagagagacagggtctcattctgtcacctcagctggaattcagtgttgtgatcctcacccactgcagccttcaactcctgagttcaagcgatcctcccacctcagcctcctgagtagctgggactgcaggcacatgccaccatgcctgttaaattttttgatttttttttttcagaatgggggtctcactccattgcccaagctggtctcaaactgttagcctctagtgatcctcccaccttgggctcccaaagagctgggattacaggtgtgagccactgtacccaggcaaaagataactttggaacaccacctgagaatgttacttacaatgaatcctgtcctcattctcatttacttatttggatggagtttcctgaaatttgtctcactatcatctaggatcctttttctttctccaactgggagattgtgtctggtttggaaactgcaagccctgttcaggaaaagggaaaagacccaaggcacacacccagtccccaggtgatcatcaggcccaggtgaaaactcaggccttaggtgcacctccggcctcaggtggacacccaggccccaggtgatcaccagtccccaggtggacacaaggccttaggtgaacaacaagacccagtaggccatcaggccccagctggatacagtccccaggtgaacacaaggccccaagagggacataggccaaggcagacatcaggccccaggtggacatcaggcctgaggacgacatctggcccctggtgaacatcaggcacaggtgtccaagcagagcctgggtggacataactgtgtacgggtcaggagatgacctgaggggagggtgagtagtcagtaacccagtggagtcctgagtaggcttatggaaggaaggggcctaggggacagaaccgtaaagaagcgacctcacttcctcgatgatgacacacacgaagagaacttagaactctggtaaccaggcacccatatcctagagtcagcgccgtaaccagctcactttgtgggagacgctcaagagagcaagatgttctcctgttgcttccccacttcgagaggttgctgcttcaggaatggagggagtgagagccttttccgacaatgccgaagaaggctcatccctcaccccagacgcctgtggccctttgtaagaaggcgcacccaggtaccacaggacagcccggggcaggccctagctggccaggccacaccagagatcccatcggggctgcctctgcacattgtccttgtccaggaggagattcgggagcccatggaggcacagacacatggtgaggtggctgcagcctggaagactttgcgggggcggtgcttttgggctggaatgcctttgaattcagtgaggttgtctctgtgtttggaaattccagtggaaagtgactgatgctggtgaccctttctcctttttcagctcctggtccgtacgcagacatagcagcacttgcggcaccggctgtcgagccaaagccagcatgggaagagccccctccagagagagcgctggaggtggagggagctccagccaaggaccagcccagccaggagctgcctgaaatcatggcacctactgtagccactggccttaatgctggagctgaaaacgtggctggagagagaagtgggagggagggggtgacaagcacagccccagccagcagatcccatgctgcccctagtcctgggcatggtggcaaacatggaggcggagaccagggcattcagactggactcctgtacctcgctggagagaggcttctctcattcgccggaaccacagccctgctgctgcagggcctgtttattgtgctaattctggtggggtatatctctgtgaaggtgatgctcaagagcattaaaacaaggctgggaagaagagttccagcagctcctcctgctctcagacgcaatcttctcctccaggcatggaagtgtgtctgcaactgggcatccaggctgtttgcccctaatgtgctgccccgaacgggctcttaacaggtgggcaggggttgaggggaccaggaggtggctccaaagggtacagcaaggaaagcttttaaagacagctgttgtgctccaggctctccatgccaccacctgccctagcatttattaatagtgttagaattacaagtttatgaaatgaaatataaataaagtttgatttctgaaacttctcacctttttgaactccctaatgttagatggtgtttttgaggctatcctgaaaatctcggatagttgtgtcttttgttgtggttgtttgtgtggctgaattaccatcgagtcatctgttattggaaacctttcaggtatggcttttagaagaccttgacccactcttgcctgttttgactctctggtttattgtggaaagagggatgatgtaggctcatgtctccggcagatcaatcaccttttgccatcaaggatttggcatcagagtttccaagaattatgtgtgcaaattgacatgctggtactttagctaatctgggtgtcaaaacagaatgccatagactaggtagcatagaaaattgatttctcacagttctggagatggtaaaatccgaggtcaaatggtcagcagattccgtgtctgcagagggctggcttcctggttcatagacagccatctttttactgtgtctttacatgacagaaggggtgagggagctctctgcagtccctttgatagggacaccaattccattcatgaggtccctgccttcatgaaccgaatcaccttccaaggccccacccccaaataccatcacatagaatccaacgcatgaatttgaggaggacaataacatttgctttatagaatcaggtcaccccgagccatatgcactcacaggaaatctataatcttctattaagtatttgctggtcccctctggggattgtctaaacaaaattgtctaaacaaaaatttagacaatttttgttttctttaagaaaaatgctctttcatgtgatccatggtttattcatagaaagcactgtgagttcacacacttgctaaaaagaaggacaattgcgatacaaaaatgagagtgacctccctctctctctctctttttaaccaatcaactgggctgagacattgtagggacccttggctgggcagtaggacttgagtagctacatacggcaaatacaacttcttgctcagtttggagtagaaaaggtgacagtttgtcaacaaaagaaaaagtaaagcagatggagaagttcttagttcgcattctagctataccacctcttccttatcaaaccccacccccaactcaggatctaacatgtaaaagagtaaacacaaaggcactggtaaccaactgactcttctgaatgcccttgctatctcctacaacaattccaggctgagcataggggtcaggaaggtagcaggaacatgatgatacactgtggaggtcagccagggctaagacagggctgctcattagggctagaaattaagaagggagaggctaagtgcagaccagccctagcctccaagtcagcacgcaatgagactgtgacaaaagcaggcagaggaagcttgacgtagaaaggcaggggaagaaagcaagtacggggcgagaagggaaatgtgcagtgaaagcagccaatctgatggcagagggagaccggtgcttagaagcttgtttggtgagagggaataaatagaggaggcacagaaatggggaacaaacatttaactagtgagagagatttaagacgaatgggaagagaaatctcgcaaaaaggacacattcatgcagatcctcaaagatggacacgcagtcatccctacatgtagaaatatgctcagttacacatataaaaacacagatgcatggagagcaagcatacacacagacgcatatctctacacatgcactcctgtgtgcccagatacacacacactaaacatgcaaaacatgacagcatttacacatagatatgcaccctcacatgtgtgcaaatgttacatcctcacacagagacccacattccagtgtgcacatatccacacaggtacacagccatagaactgacatacatacacatcaacatataatgtgcacatacagacaggcacgcgcagatatatctatgcacatagacacatgtactcagtcatgcacatacacacactttctaacacaaaggtgatcagtgtagatgaatattgtgagctcagtggcttcccagaccttcatcttttccctgctcttgtttcaaaggtgctcagcagactcctggcgaggctgtgtgaggcaggggcaggaccttcagagtcctcacagctttgtgaggcaaaagtctgagtccagtcctggcctctgctgctcacccaccactgggctattaatgccctgtctgtaggcgagagattctgcatagactagtcttgggatttttttctaactggccatttttctccttggcacacccactatcccactggtaacggcacacactctgcaagggaaacctgagaaatggttgtgagtctcctcggacaataagcataccctcccacccacagctacctcaagtgcccagcaaatcagaaccaaaattataaatacttacgactttacagtaattggcaacacatatactatagtacttacagtaccttaaatgcatctgtttctctggtgaagcaatctctgagatggaacagtgttctgtgtttgccaagggagacagggccaatgcccaggacactcaggacgtaggggcataaggtggcatatcgtgggggtttctggtcgatctgcaaggcccagcttctccacgaacagtgggctgtagtgagaagcttgccaaggtatgcataccgactggagttggactctccccatccttagccctgtggtcctttggcctcagccacaggtgctcagagtcctcccagggtggacaaatgtttcagtgtttttggcctgacctgatactacctggggacccaggctgccgggccggtgagctatctgctttctcagtcaaagggctctcgaaccagcagcatcagctttttcttgcctttgtagatcgtttgtggttgttgatgaacagggcaaattgcaggtagccatcctaaggcagcaggagggtctcccgagccttgcttagaaactcaatgaactgtccatactggcaatggctaatgtgtgttaggtgtagtgtgtggtgttgatgtaagcattgcatcagcaactggtgccatggagctctgtcagtggagatgagctttccagagctgtggtggcccggggtgccggccaggccaggtgcagtcaccgtgcagcctcgcacacaggatgtctgaaagcaccatggcaatgtgcgcactcttcaccaccagggggatgagaactgccagctcattcttgcccagagagtggctgagggcacaaacccagagcacatcactgatggctgggtgggtatcctggttatgagccaggtgaagatggctcatggccaatgagaccagcttgaaggcgtggagcgtgtagccctggagctccacgtagcaggcaatggtgaacagctgtgaatgggtcatgccaccggcagcagcctcggtggcaatctggcaggctgcctcaaaggcaatgtggtctttctcacagagtgtaagggctgacagggcacagctctgtggatgcttcgtagcacactgcagggccagtgtgcaagcacagctggccaattcctcccgctgtggatagtcaagactgaggcgcaggatagtggtgtgggatacggctgtggcagctacaatgctagcagcctcagtaggggtgaagagtgtgtgccagctctgcaagatgctccctgaggcccacacacctgtcggggagagcctgagctcagccgtggccatctcagtcctgattcaggtcggcccagattaccgtgtggggtttgaacttggcctgcagagatgagttctccctcctcctcagcaaccttgacatgatctgaggcaaaccagggcaagagaagcatcccagatggccaaaccttgtttggggtctcttcctatcccttccttacccaggtcagagggttgaaggtttctgcaggtgctctcagcccctcacaaggatggagcagtagatcctggggtttgcttaacccaaggccagggttgcagatctgccaggggttctagctgaagtggggcctgtcagggtagagtcttgtgctggggctttgggctttagaaagggtcctgagcctccaaggtgtctggagtttctcacaagcatggacagggacggggaccaaaccaccaggcccactacctcccaagggcacacttgagtattggcagctgaaaattcattctcttagacatgtctctgatgagagggtcaaagtgctgctgacatcagcatgtggttggtttaagcagtgaggacagaacttgggctggctgaacagaggctatcttctcccaccagcagccgcatcctttcttaggccatcaggaataggaatatgagagctccaaggattcgttgtcctgtcccaagagtagggtatagaaactcctttcccgtgggagtagagggaggtgggcgatacccacttctgtagcacaggtcaccaaccatcataccatctctccgcgtctccagttaagggatgataaggtcatcgcatcacctgtaacccaggttccagggccacgttgagcagggtgctgtcagtactgttagtgggagtagcaatcctgaacgcattttgggccagtttgaagatgaggggggaagaacgaatgtgcttctgcattgcttccagaattgttcagagcctcaaagtgtctcctttggcagcagtcagcatggtggaggccagttcccaccgctgtgattccaagtgtccaagcaagaaccagggaggataatggctgggcaccggggacaccatacagtgagtgagggatgtgtcgcctgcacaacctgaattttctaaaacgggtaaccttatacacgtaagcctaatttataggcagggtctggatcacgagacagcagagctgagaacaaatacttggcagaggtatgcatggaaacgctctctcggtggatgacttctcccagatccctgaaagggtccccttccagcagcaagatgcactatttttggagtgtttgcactgggtcatcatccaattgcagctcttggaggtggctgaggagctgctcctcattacggcacaccttgtcctgtgcataggagccttcaggcattaccctctgtgacccaggcccatcgatgcagcctccagggccaatgacaagtaggactcactgctgtttggggagcttacagccacaggtacatgttggtacacagggggtctgctttcattcgtatctagatacctgtcatcattcaggaggcaggcctcagtcaaagtgagaaacaggcagccgatgggatccagggggtggcccacccagccttccaggtttgtgatggttgtggttcccctctgcagcacttctttcttctgatgcttgtagattttcagttgccaccgctgctgaacctcagagtattaataatggccactgtgagtctgagggcctcttttggataaccatgggaatgtggggcatcaacccgagcacaggctgttgcacatgctcaaaccacagtggctggccttgggaattaaagagtagtcttggccaggcgtggtggctcatgactgtaatcccagcattttgggaggccgaggtgggcggatcatgaggtcaggagatcaagaccaacctggccaacatggagaaaccccgtctctgctaaaaatacaaacaatttagctgggcgtggtggcgggcccctgtagtcccagctactcgggaggctgaggcaagagaatggcgtgaacccgggaagcggagcttgcagtgagccgagatcgtgccattgcactctagcctgggcgacagagcgagactccatttcaaaaaaaaaaaaaaaaaattagctgggcatggcggcacgtgcctgtaatcccagctattcgggaggctgaggcaagagaattgcttgaactcgggaggtggaggttgcagtgagcccagatcgcaccactgcactccagcctggcaacagagctactagactgtctcaaaaaaaaaaaaaatattgcacagatccctgaaaatacaattatatagattttcttttttgttttgttttgttttggcttggttttttgagatgaagtttcgctcttgcgcccagcctggagcagtggcgcgttcttggctcactgcaacatccacctcccgggtggattctcccacctcagcctttcaaccaagaagctactttttgtttgtttggttggttggttggttggttggttgcttgtttgttgagacagagctttgctcttgtcgcccaggctagagtgcaatggtaagttctcggctcactgcaacatccgactccaggcttcaagcgattctcctgcctcagcctcccgagtagctgggattacaggctcccaccagcaagcccggctaatttttttgtatttttagtagagacaggttttcatgatgttagccaggctggtctcaaactcctgacctcaagtgatctgcctgccttggcctcccaaagtgctgggattgcaagcatgagccaccgtgcccagcctgattatatacattttcaataaacatatatgaaaatggtctcaggcattttaataattagaagaccaaaatcaataaaaatgtaataacattacccactaaccagaatatataaaagaaagactgacaaaatcaggtattggaaaggacatctaattagaatgctcttaaacttgtggttgggttgtatattagtcaaaaaaatctttggaattaaaaaaattaattgataaattgtgtgtatttgtggtgtaccacattatacatatatacacacacacagacacgcattgtagaatagttaaatctgtgtatatctatatagccacagacatacattatagaatggctaaatcaactgacatagcatatcagttagcttagatacttatcttttttttttaatttttttatttttagatggagtctccctctatcacccaggctagagtgcaatggtgcaatctcggctcaatgcaacctctgcctcccaggttcaagcgattctcctgtctcagcctcctgagtggctgggattacaagcgcctgccaccacgctaggctaatttttgtatttttagtagagatggggtttcaccatcttggcaagcttctgacctcgtgatgcacccacctcggcctcccaaagtgctgggattacaggcatgagccactgtgcctggccaatcaatacttatctttttgtgtgtgtttggtgagaacatttaaaatctgctgtcttagcaatttcaaatattaccacattttttttttttttgagacggaggctcactctgtctcccaggttggagtgcagtgtcacgatctcggctcactgtaagctccgcttcccaggttcacaccattctcctccctcagccttccgagtagctgggactacaggcgcccaccaccacgcctggctaattttttgtatttttagtagagacggggtttcactgtgttagccaggatggtctcgatctcctgacctcgtgatccacccgcctcggcctcccagagcgctgggattacaggcatgagccactgcacctagcctaaaagtactcattttttattcatcaataattagtaatctgactcgtttcaaaaatttggttattattgacaacctctttgaagatccatttcacaaactcaacagagtgccacgattaagagctagggatcccccaaactatctcaagcatctaaaaaattgccattttttaaaggcttaaattgtagtagtaaagggggaaaaaacccataaatcatctaaaaaattgccatttgtaaaggcttaaattgtgtgtgtgtacacacacacacacacacacacacacacatcattgacctttcttaagacttcagagggtggaacttccggatgtgaccacagagagggagagaccgggaacgcggagcgcggccaccagcacccccgagccgccgccggacccccgccgccccgggccgccccccgccccccgcggtcccaggtctgtgggtctggggacggttcgattccccgcagagccgggggagggacgggggcgcccaggggagggggcctcgggcgccccgcccgcgcctgctgccccgtcccggcggcaatgcgctcctggccgtgacccccgctgggggccggggccgggatccatgcgcggagcccccacccggcccggcgcctgccgctgacggcggcgggggctggggggcgcgcgtctggcctcctgcccaccccctggcgtcgacatcacgggccgtaggggtctgcggccccgggctgcgccctaccccccggccaggctctggagggaccctggaactgccgccggcctcagcccatggcccggaggtacgatgagctgccgcactacccaagcatcgcggatggccccgcagccctggctggcttcccagaggcagtgcccgcggcaccagggccctatggccctcaccggcctccccagcccctacccccaggcttggacagcgacggcctgaagagggacaaggatgagatctatggacacccgctcttccccctcttggccctggtctttgagaaatgtgaactggctacatgctctccccgtgatggggccggagctgggctggggacaccccgcggcggcgacgtctgctcctctgattccttcaacgaggacaacactgccttcgccaagcaggttcgctctgagaggcccttcttctcctccaacccagaactggacaatctgatgatccaggccatccaagtgctgcggttccacctgctggagctggagaagggaaagatgcccatcgacctggtcatcgaggatcgggatggcggctgcagggaggacttcgaggactacccagcctcctgcctcagcctcccagaccagaataatatatggattcgagaccatgaggatagcgggtctgtacatttggggaccccaggtccatccagcgggggcctggcctcccagagtggggacaactccagtgaccaaggagtcgggctggacaccagcgtggcctctcccagttctggtggagaagatgaggacttggaccaggagccacggcgaaacaagaagagggggatcttccccaaggtggccaccaacatcatgcgagcctggttgttccagcacctctggcacccgtacccctcggaggagcagaagaaacagctggtgcaggacacggggctcaccatcctgcaagtcaacaactggttcattaatgcccggagacgcatggtgcaacctatgatcgatcaatccaaccgcatagggcagggtgcagccttcagcccagagggccagcccatcgggggctataccgagacagagccacacgtggccttccggcctccagcatcagtggggatgagtttgaacttggaaggagaatggcattatctatagaggctgatgcgggagagacccagcctccggctgtgacccccagcctcacacctggctctggttcccgcctggtcctccggcttcaggaccccacctccaaaggcctctcccctcaacgcctacctccctagggccctgctgggacatgggggcctgagtgcccacccaaggggctctcaaagacaccggcaaggcctccaggccctgagccccgcttctgccttcacctctgcctgggacccgagctgggctcctgggccttggtccccagaagatggcagctagggcctcgccgccaggacagagaagggacagggtggctgggcagtcagggaaggagggtcgcccggatctgacattttggagagattccttcaccctcctgtcccccccacctcccttctctaatttcttcttttttcaatgataaagtcttaaaacacagaaaaaaaaagacttcagagaattaggtagatgaagcactttatacagtatatatcttcagcttaaatttgttttgagtatttttttttatttttaagtaggcaaagatttaaaattttttatttttagtaaatgtttgaagcaaactaaaaagacttgggcaatatttaccaaaacaaaacagaacccaaaaaattgtacatcttgatcttagcaaatatccttattgtagagacatttaataaagagatggtattttaatatctgcagttctgaggtagggtgtaacttagttctacattgtgatttaggaatttttaaacctttcttcttcaggggagaagtgacccaggcctcgagtttagtgctaaagccactagtgtacttatgctgtcacctaaccaccacatgcgacatggaggcagaggctaaatataggggctttcttaagaaagtgagaggaaattagcaagcattattagtgtttgactactgctatcaagtgaattcaaaggaaacaggtttttatgccatatttaagttacagaaaccggcatgcttagaatagtttctaaggcgacagagtgagactccatctcaaaaaaaaaaaaaaaaaaagaatagtttctagaggttattggagaatagaaagctaagaaaacttggtatacatttacaattgaaatataattacactttttactctcagaatattattcagattagacttcctgtttatcttttatattcttgcattgatataatgcctgatccttcaaagttctttcacatattatatgatcttctttatgaaaaaaagtagatgctttattctgatatattcagtttcccacttaggcaaaagtggattaatagaatgatgaattcaaagtagatgaggaaaatcaggcacagagaagtagaggtagggacagacccaaattcacacaagataatgacatcgccagcgtttaagttgatcatcaaaggctgggctggatttgtcttgctgtatgtgtcaggaaatttatacctattacattttccattttctcaaaataagtcacatgattgtaatgtttagctgcaacttttctcctaacaaatagtgtcatgaagaatgttatagtgtgaagtttgtacatttcagggtcagttatacaatgtgacctctttatctacgggaatgagaatggaggatcattgaaagccatgatataaacaaatttgcatgttgaagcctgtataaaacatggtacagtgagtgaatgcccccatccccaagaacactttatacatattaaatggatatatgattactgtgcaaaaattcattctggaaatgaacatatatttgagcactaatatgtaatgtacatcttctgccctaaggagaaaataaatcataaaacttgttttacattcaaaattactttcccgagcatgtcttagagtaatctacgtgttgatgtatgtaaattgtattttaggtaggcaaagaaacatctggttatttatgtaaaaaactagtctaataaagtgagtggctttatcactttgaatctttagtgtctaaaagtggtgtttaaagtaatactagcacatcagaaaaccttgtgtggacaaaactagttcactcactgcttctgcaactgcagttcctccccttagggttataaaaaaaaaggacccaaatgttacatgtgttgatattatgacttgtcagttactgatgtctgtggtatcctaccctcgtctctgaagcggataatactgaataattattagaaaactacaagacttcacactttgtaccattaaaacctaaaattttaatcctatccttttttattacagatcaatcagcactcaggaacagagcagcaaggaaaaaaaggaaatttcattcatatgttctgtgttcatatctcttcagtacctaattgttcatttaatttcagccttattccttcataaggggttttaccacatgaagtcatccgatgaccctagctcttattgtgaagttaaagatgagtggagtatacttacaaatgttacaacttaaaaatgttacaaaacatttattaaagctcatatttaaagtagagcatctagtttgagaagtagacatcaattattaaagatgtcttttttctacccatttaactagttaaaaccatgacgtgtaaatgtagaagtagaataatcatatggaattccctaaaatatttctgtttactaacatatattgaccaagtacatcaagcaggagagatcttccttcattctgttatagtccacatcattctaattttgctcagttgttattaagagcatattcctaaaccatacacttttgtttcaataaagttttattttgttgagatgaataaaatatcaaagttaaaagctacatgagacaaaagttcaattgttcaaaaaatttactgggatagctttctattataggtattgttaaattatattgctctgataagattactttctttaaaaagtttgtacttttctgtaaattgaaagaatatggagtcataaaatggcaagtgttttagggttagcctaaaattgggcattgtcattgatttcatagacggtataaactagcaggcttacagcctaattcttctttggactggtctttggcagcagttccttttcagactcaataaacagaattcagacagatgtaagtcaaaataaaactttacaaagccaagtgtattatcttttgcattaacctattttttccatcatacatgctactagtatgtgcattagcatgatattctcatatacattgcattaaaaattaaaaggtggcagctcagggtgagctcttctgtcattcatttgttcctaaatttttaagggctttttctcagtcaatatttgtataaactgggtagtttaacttcattacccatttcattaaagttgatggattgtgatgagatgcatttaaggccaatagtgacagatttttttttaatctgttgaacacaagcgttgaatgataactacaggttttaagtgctgttaacattaataccataatgtgatgtgttagaaccaaagggatattttaaaggtagatatctgaaaattctctagtctcaatgtatatatgtattgaatatactctaaaaataaatgtgcaatttgctagtaggacaatgcagtgattagcattaggtatgtttcttttatatcctagctatgtcccactttcttctaagtgcaatcctttcatgttcacttgctgttttacccccctactctaacatcagttggaagccttgtctagagtacagtatgtgtttttacctttgcagtgaattgcatgtgctaattgtaaccacagctatttttatgttgacataactccaagtgttatattaaatgttctattttatattagctctaatcccttaagtaaattttaagaaataaattcttgttcaaaaaaaaaaaaaagtgcttccttgtcctaaggtcatgacaactttcatgtaagttaacttaaatatggaagctttattggcttgcctttaacatttaatttagatctacaatgcccatggaactaattttttctgaatatgtttggttgaatgaaggctttttttttttttttttttttttgagacggagtctcgctctgtcgcccaggctggagtgcagtggcgtgatcttggctcactccaagttccgcctcccaggttcacgccattctcctgcctcagcctcccgagtagctgggactacaggcgcccgccaccacgcctggctaatttttttgtatttttagtagagttggggtttcaccgtgttagccaggatggtcttgatctcctgaactcgtgatccgcctgcctcggcctcccaaagtgctgggattacaggcatgagccaccgtgcccggccgaaggcttattttttttccatattgatatccagttgtcttatcactttttagtgaaaagaccatcctttcttgtgcagtgccaccttaactataaattaagtgttcataaaatgggtgtctatttctgggccttctcttctttgccattgatctctttttctatcacttaccagtattctattaatatccagtagagcaaatctttcaatcttgtttttcttcttaaagattaagtttttggttattcttggtctttagtgtttccatattaatgtcatttattaagtatttttgcaatttgatttccaacttaattgctctgtagtaagaaaacatactttgtatgatttcagtccttttaaatttgagaggtttttagtgtatctcaacatgtggtaaattttaataaatattctgtgtcttcttgaaaaggatatatctccaaaaaaagttttaatttgaaagatgttctatatataagtagaaaaataagaggaaactcagatcacaaaatatagaaatgtctatggggcaaagaaaaatgccagaaacttaccaaactgtcttaagtgcaggcttcatcgctgatccctggcataatactccttcgcacagaactccataagtatgtgctgatgtttttaggtatcaaagtcatgtgacttagcattacttgagacaaaatatttttttcttttgccttgggtgtaccagctgttggctaataactccaagaataggatgttattaaactttagaaacatttgctttcaggatctgccagatcatcttttggagatcagaagcttgaactttccagttcatcccagcctggatccagttatgatgtatataacctgttctgtatgtatcagcacatttcacctgatttgagtctacgttttcttccctgctcagaagtgacaagactgtatggatcaggtatgaaaattttttatgcttttcctctttgtgtttctctttaagaaatgtagaattcgggccgggcgcggtggctcacgcctgtaatcccagcactttgggaggccgaggtgggtggatcatgaggtcagcagatcgagaccatcctggctaacactgtgaaaccccgtctctactaaaaatacaaaaaattaaccgggcgtagtggcgggcgcctgtagtcccagctactcgggaggataaggcaggagaatggcgtgaacccgggaggcggagcttgcagtgagccgagattgcgccactgcactctagcctgggtgacagagccagactctgtctcaaaaaaaaaaagaaaagaaatgtagaattcgaatctaagatctgagaataaataaatgattcttactattaaaggcaatttaaaaataagaaaaaagcaagcttcctaaatgttgtgataaatattatgacttccctgtagtgttatatctaacataaaaactgaattaatgagttatgtctgtttgtagtcctaaattccactgtagttttccttttttgaaagaagttttggttcaagagatcttttgtacagcatagggactataatagttaattatgatatattcttaaaaagtgccaaaagagtggatattaggtgttctcaaatcgctttttcttatcactcaaaagtggtaactatgtgcagtaatacatttgtaaattagctagatttaatcattccacaatgtatacatactttaaaacatgttgtacacgatgaatacatacaataaaaaagaaagaaattagctgcatgccagatacaagagaaaaaacatgaaaaagaaagaaattctgttttcaaattattttgtgttgttgttgttgttacagggtctcactttgtcccccaggctggagtgcagtggcgtgatctcacctcactgcagcatcaccctcccaggatcgagggattctcacaccttgggacccccaccccccagcagctgggactacaggcatgtgccacaggcacacgcctgagtaatttttttgtatttattgttgagacagggtttcaccatgttacccaggttgggctcgaagtcctgggctgaagcaattcccctgccttggtctcccaaattgctgggattacaagcgtgcaccactgcacccagcccagaatattttgcatacattttgcctgtcatttgtctatttataaattctacaacagatattcgtacatagatatgttgtacaaaacacaatattttttcatttcttctgtattcagtgaaaatgataaatttagaaactcatgatgtgattagaaatataaacaaagaaaatgcttaaatgattattgaacttttttagtttcatatttgagactgtatgaattatagtctaccatgtttgcctgtgattcacaaaattctgtttttcagggtatatatatatatcaaccactgaatttagtgtcaggtactgaaaataaagaagaaatacttatttaagggcctgccttgcgttcactactgcgctagcatatacatttaacatgcaaagttcctttcatcagagttcctacagtttagaagggaaactaaaattacagacgagaaatataggagcatatgggattcagtattgattttttatttttttattttttgagacagtcttgctctgttgccacgctggagtgcaatggcgcaatctcgactcactgcaacctccgtctccgggattcaagcgcttcccctgcctcagcctcccgaggagttgggactacaggcccgcaccaccacgcccggctaattttttgtattttagtagagacggggtttcgccatgttggcccggatggtctcactctcctgacgtcgtcatccacccgcctcggcctctcaaagtgctgggattacaggcgtgagcaccgcgcccggcctcagtattgattttttttttcatgtacgaattcacattttactctctcaagtattttccccatgattgatactcacatgtattttccctgaagtacttactgttctctgcattgaaataacaaggtaactacccctggagacctctctaaatgtcctagaagaggtaaagggtacaattagagtaatagaccatctattgccactgactaaggttgaagtcaaaattagcactcatctttatctgctccatccagtttgtttccaaaccttcagagatttttttgtttttatttatttatttttatttatttatttattttattatactttaagttctagggtacatgtgcacaatgtgcaggtttgttacgtatgtatacatgagccatgttggtgtgctacacccattaactcatcatttacattaggtatatctcctaatgctatccctcccccctccccccaccccacgacaggtcctggtgtgtggtgttccccaccctgtgtccaagtgttctcattgttcaattcccacctatgagtgagagcatgcggtgtttggttttctgtccttgtgatagtttgctcagaatgatggtttcgagcttcatccatgtccctacaaaggacatgaactcatcctctttatgactgcatagtattccatggtgtatatgtgccacattttcttaatccagtctatcattgatggacatttgggttggttccaagtctttgctattgtgaatagtgccacaataaacgtacgtgtgcatgtgtctttatagcagcatgatttataatcctttgggtatataccccttaaagggatggcttggtcaaatggtatttctagttctagatccttgaggaattgccacactgtcttccacaatggttgaactagtttatagtcccaccaacagtgtaaaagtgtttctatttctccatatcccctccagcacctgttgtttcctgactttttaatgatcgccactctaactggtgtgagatggtatctcattgtggttttgatttgcatttctctgatggccagtgatgatgagcattttttcatgtgtctgttggctgcataaatgtcttcttttggggagtgtctgttcattccttcgcccactttttgatggggttgtttgattttttcttgtaaatttgtttaagttctttatagattttggatattagccctttgtcagatgggtagattgcaaaatttttctcccattctgtaggttgcctgttcactctgacagtagtttcttttgctgtgcagaagctctttagtttaattagaacccatttgtcaattttggcttttgttgccattgcttttggtgttttagacatgaggtccttggccatgcctacgtcctgaatggtattgcctaggttttcttctagggttgttagggttttaggtctgacatttaagtctttaatccatcctgaattaatttttgtataaggtgtaaggaagggatccagtttcagctttctacatatggccagccagttttcccagcaccatttttaaatagggaatcctttccccatttcttgtttttgtcaggtttgtcaaagatcagatggttgtagatgtgtgatattttttctgagggctctgttctttccattggtctatatctctgttttggtaccagtaccatgctgttttggttactatagccttgtagtatagtttgaagtcaggtagcttgatgcctccagctttgttcttttggcttaggattgtcttggcaatgcaggcccttttttggttccatatgaactttaaagtagtttttttccaattctgtgaagaaagtcattggtagcttgatggggatggcattgaatctataaattaccttgggcagtatggccattttcacgatattgattcttcctatccatgagcatggaatgttcttccatttgtttatgtcctcttttatttcattgagcagtggttcgtagttctccttgaaaaggtccttcacatcccttgtaagttggattcctaggtattttattctctttgaagcaattgtgaatgggagctcactcatgatttggctctctgtttgtctactattggtgtataagaatgcttgtgatttttgcacattgattttgtatcccgagactttgctgaagttgcttatcagcttaaggagattttgggctgagacgatggggttttctaaatatacaatcatgtcacctccaaacagggacaatttgacttcctcttttcctaattgaataccctttatttctttgtcctgcctgattgccccggccagaacctccaacactatgttgaataggagtggtgagagagggcatccctgtcttgtgccagttttcaaagggaatgcttccagtttttgcccattcggtatgatattggctgtgggtttgtcataaatagctcttattattttgagatacgtcccatcaatgcctaatttattgagtgtttttagcatgaagggctgttgaattttgtcaaaggccttttctgcatctattgagataatcatgtggttttcgtctttggttctgtttatatgctggattacgtttattgatttgcgtatgttgaaccagccttgcatcccagggatgaagcccacttgatcatggtggataagctttttgatgtgctgctggattcggtttgccagtattttactgaggatttttgcatcgatgttcgtcagggatattggtctaaaattctttttttgttgtgtctctgtcaggctttggtatcaggatgatgctagcctcataaaatgagttagggaggattccctctttttctattgattggaatagtttcagaaggaatggtaccagctcctccttgtacctctggtagaattcggctgtgaatccgtctggtcctggactttttttggttggtaggctattaattattgcctcaatttcagagcctgttattggtctattcagggattcaatttcttcctggtttagtcttggaagggtgtatatgtccaggaatttatccatttcttctagattttctaatttatttgcatagaggtgtttatagtactctctgatggtagtttgtatgtctgtgggattggtggtgataacccctttatcattttttattgcgtctatttggttcttctctcttttcttcttcattagtcttgttagcagtctatcaattttgttgatcttttcaaaaaaccagctcctggattcatagacattttgaagggttttttgtgtctctatctccttcagttctgctctgatcttagttatttcttgccttctgctagcttttgaatgtgtttgctcttgcttctctagttcttttaattgtgacgttagggtgacaattttagatctttcctgctttctcttgtgggcatttagtgctataaatttccccctacacactgctttaaatgtgtcccagagattctggtatgttgtgtctttgctctcattggtttgacttttaacaattttcacttgagcacccacttgaatatgcttttgtctggccataaaaatcccacatgggcaccctcagttcactaaatactgctgtaaactcatatgacagggtctccagtaaatgagcaagtttcttttctcggcatcttggctgagccacagcacgaaaaggcacacctatcttgtgatgtgcctcaagagcctatgaaggaagttctgctgcagctggtcactgcctttttctctgaactttctgataatgtctaccttttcaatgtcaaggtcacttgcattagcctatattaaaaagttgcattttatcatgaatataaaaagatcagtccaaaccaattccagacagaatataggcacaaagaaattcatattatccgggaaaaatcactcatatttttcttttcttcttttttttttttttttttttttttgaggctgagtctcgctctgtcgcctaggctggagtgcaatgacgctatctcagctcactgcaacctctgcctcccaggtccaagcgattctcctgcctcagcctcctgagtagctgggattataggcatgcaccaccacgcctggctaatttttgtatttttagtagagacggggttccaccttgttggccaggctggtctcgaattcctaacctcgtgatccgcccacctcagcctctcaaaatgctgggattacaggtctgagccactgtgcctggccatttttttttttcgtttcttttcttttctttctttctttttttttttttgagacggagtctcactctgctgcccaggttggagtgcagtggggcaatcttggctcactgcaagctccgcttccccggttcatgccattctcctgcctcagcctctcgagtagctgggagtacaggtgcccgccaccacgcccgactagttttttttttttttttttttttttggtatttttagtagagactgggtttcaccgtgttagccaggatggtcgtgatctcctgacctcatgatccacccacctcggcctcacaaagtgctgggattacaggcgtgagccaccgcgcccggccacgcccggccatttttcatatttcacaagctgaaaaaaagttataattgtcctttaaaaatacatgactaggccgggcgcggtggctcacgcctgtaatcccagcactttgggaggccgaggcgggcggatcacgaggtccggagatcgagaccatcctggctaacactgtgaaactccgtctctactaaaaatacaaaaaattagccgggcgcagtggcgggcgcctgtagtctcagctactagagaggctgaggcaggagaatggcatgaacccgggaggtggagcttgcagtgagccgagatagcgccactgcagtccggcctgggcgaaagagcgagactctgtctcaaaaaaaaaaaaaagaaaaagaaagaaaaattaatgtctgtggcatatgcctgtaatcccacctactcgagaggctgagacaggagaatcgcttgaaccagggagttggaggttgcggtgagccaagatcacaccagtgcactccaggctggcaacagagcgagactctttctcaataaaaaaaaggccgggcgcggtggctcacgcctgtaatcccagcactttggaaggccgaggtgggaggatcatgaggtcagaagatcgagaccatcttggctaacacgatgaaaccccgtctctactaaaaatacaaaaaattagccgagcgtggtggcgggcacctgtagtcccagctactcaggaggctgaggcaggagaatggcgtgaacccgggaagcggagcttgcagtgagccgagattgcgccactgcactccagcctgggcgacagagcgagactctgtctcaaaaaaaaaaaaaaccaccaccaccaccaccaacaaaaaacttgtgtaatcaatctaggtgcaagaaaaaaaaaacaataaaatatgaagctgaggtctttcaagccagtaatatgatattgcctttttaatttcaaaaaacatgttatggctaatgaatacatgaacatgtaattcattcagattaaaatatttacagtacaatatttgtgtttagaactcatagtaacacattttatgcagcaatctctgtcaaattcattagtttgatttatacccagtgtataatacacaaacactgcacactaacaatcatgtcaactaaattattttattgaataattaaatgaacatgcctgataaaaacataactctgtcaaattcaaatgaagtcttatctaagtattttcacattttaggagtatagcgtatctctatgtatgtcactgaaagccagaattataattaaggtttattttttgcaggtagctaacaagaaatttctttgccacaaatgagtttgccaaggctactttggtcaaaaggtttctgtcctcggctcccctgttgccactactgctgggtaatggttacactaatcctctttgcatgagaggtcctgatgtgtttgctaaacccagatcgctgaagcactggtctggtgactatattttttgagaaccactgctctaaagcacctaaattatgttttctgaaacgttcccttcaggcaaaatggactagtaaaatttttgctgggtaactgagacacaaaataatggccttaaaaccttttatcctaatgctttgactttctctctaatgtggcttctaccacttgtacctagaacaattaaccacatcctcaacatcaaattatatttataaggcatattcaatatgttgacagatttaagcttatagaatgaccaaaatagaatacagataggaagcaccataaatgtaacaaaaccacttcaaaaatgtaccctgccatagccctagtagtttaactaaaatcttaagcgacaatgaatttaagctcaatttggggggttaaaaaacaacagataaaatttaggaattatttttttagacgtatggagtattaggctgctcatctgaaattattctcatcattctgaaacctgttgctgtacagccctgagagctaatttgtaaagggttattaaaaaaacaaacatgaaaacaaaacaaaatacctaaaatactcgctggctgcccttcgtggaaggtgtttgccaccccatgcactgcagaatcctctagctgtggttactgagcctggctctgattgttttgaggtggccatggtgagaaccgctcacaggcagatagtttgccatctttgatctgaaagttgaattccctattttgttgagaacctcacataataaattattcttttggacctccatattgtgtaattcagtacactccactgatggctttcattggaatatatattatataaagaatacatcaatatttctgttcctggccatatattcctgtgtatactataaaagattggttttgacatagacagtcttcttgaaattctgctttgtcaaggatattaataatatagtttgttttattaaaatcctattttccccatcttctctctgcttgacccaattccagtcattccacaagcacagcttcattccattaacattgatgcagccccttctgggtatcactcactgtgctggaggctgggagaaaacagtgaacaggacaggcctggccctgccctcactgagtggacagtgctcccacactttcttacttctatgaggaaggaatatatttcacaggaaacatcctaaaatcctagaaactacagtgacaatttacagctcagaatggaagaagtaggcagaaaaaggctcgcctttcttgaaagtgtccagaaggcaagaatgaaaagaaacaagggaatcttaatacaccaatctaccttcacataacatttacaaatatgcatcagaaagtgcccaatcatggttcaagaaatcctcaagttagccgacacaactgaacagcaactcaacagggagagtccaaattgagactagaggtcaggaaatgcatctccaaggagtcatatttaagcagagacttgaatggtgggatgtaaacagacaggtggaaaaaatgggaagaagcattttcagcaggtaaacccacgtgcaaagggtgagaagagagtgtggctcagtggactgaaaggcggcctggtggggaggaggcaggaggtgaaacgaaggctgtcaggaggtgagatggtgaaccttgctgagaagtgtgtgctatcttagaagcaatggaaagctgctgaatgttgtaaacaagcaaccaattatatctaatttgcatttttcaaaggtaacttagcagcaatgtggagaacataatgtactactgagttcagagacagggagacctacagtaagaaagcaattgcagaaagcgaggtgagtgcagctttgcattaagtgggtgagtagagctagagagaatgaaatgcagttgagtataatgtggagataaagtattcagaatttgctatttactggatgtgtcaaggatgactcccaagtctctagtgtaagttcctggtgaatgacagaaccactaacagagacaaggaatagggaaggaagagtaggcttaggggtgtgtgagccaggtgaagaaagcaagttgggacttgttacattttaagtgcttgtgagacaacaatgttacttgttagagatgcctttgtgttctagtcactggtcctattgtccaactctgaggtctttcagtcatcataggtcatttcaggcttcaaagtctggtaacaatcaatgatagactggataaagaaaatgtggcacatacacaccatggaatactatgcagccataaaaaaaggatgagttcatgtcctttgcagggacatggatgaagctggaaaccatcattctcagcaaactaacacaggaacagaaaaccaaacactgcatgttctcactcataggtgggagttgaacaatgagaacacatggacacagggaggggaacatcacacactggggcctgacagtgggggggctaggggagggatagcattaggagaaatacctaatgtagatgacaggttgatgggtgcaggaaaccaccatggcatgcatatacctatgtaacaaacctgcacattctgcacatgtatcctagaacttaaagtgtaattgaaaaaaaaaaaaaaagcacaaagtctggtaacaatgcctggtatttaaaaatagcattttaagccgggagcggtggctcaagcctgtagtctcagcactttgggaagccaaggcgggtggatcacgagtcaggagattgagaccatcctggctaacatggtgaaacctcgtctctactaaaaatacaaaaagttagcccggcgaggtggcaggtgcctgtagtcccagctactcgggaggctgaggcaggagaacggcatgaacccggggggcggagcctgcagtgagccgagattgcgccactgcactccagcctgggggacagagcgagactctgtctcaaaaaaaaaaaaaaaaaaaaaagtattttaaggctgggcgcggtggctcatgcctgtaatcccagcactttgggaggccgaggcgggcagatcacgtggtcaggagatcgagaccatcctggctaacactgtgaaaccccgtctgtactaaaaatacaaaaattagccgggcgtggtggcgggcgcctgtagtcccagctacttgggaggctgaggcaggagaatggcatgaactcgggatgcggagcttgcagtgagccgagattgcaccactgcactccaggctgggtgacagagtgagactccgtctcaaaaaaaaaaaaaaaaaaaatagcattttaaatgcatgaaagttacatatctttaacttaatttagttattgctatgtaatccaactatgctggttctgctataccttattaaatgtgtattcatgtgtctcaacattttctttcaacaaattcttagttacactcttagacgaatagtttgctagcaagtttaatttgggaagtgattaaaaataaatcagtgactaattgcataataactttaacaggaattagaaaaaataaaatagtattaaaataggatctcatatcgaaaagtatgagagggtgctgtgtttcatatgattctaggattactaatactactttcctacttaacatcaaataaaaagcttaaggctattaaagtttagagaaatgtatcccatttattcttagatcaaaatatatcctctattcatatgtttgaataaactgagaatcagaatctcattctcaaatttggctacaaataaatccacatcttccctcacctgcaccagctcttcagcacctggacacaggaccgtgcttcgcacatcttgctcagcaccgtgccctgcacaggggaaaagttccatgagcagatattgaaccgaattgagctagtgttcttttctcttttctttgctttgctttgcttcgcttcgcttcttttccttccttccttcctttccttccttccttccttccttccttccttccttccttctctccctccctccttccttccttccttctctctctctgtctttctttcctattatatctccctttcttttatttccttttttttttttttttggcggagtctcgctctgtctcccaggctggagtgcagtggcacacaatctcggcttactgtaacctccacctcctaagttcaagcaattctcctacttcagcttcctgaggagctgggattacaggtgcgcaccaccacgcccagctatttatttttatttttagtagagattaagtttcaccatgttggtcaggctggtcttgaacccctaacctcaagtaatgcactcgccttggcctcccaaaatgctgggattacaggcattagccaccacgcccgacctgagctagtgctttttctaattagcttgactattttctgtgttttccacactgggagtagataacaaggagcagcattctctcatatgactaaacatcagtattagcttccaggttttccttcatcagggaaggtgactacatccactttcctcccatgttgttatcttcccattaatgcattttctaaactcaaatctactcagagcaggcccggtactgaatagaaggaggttctataggtagcctcttttttctccatatgctccctaaacatttcaaaatacatattctttatttttacagaataacaggtttataaatattaacatgtattgatgctgttaaataaaacctatttttttccactgaagcagccaattttttttttttttttttgagatggagtctcactctgtcacccaggctggagtgcagtggcacgatctcggctcactgcaagctccgcctcctgggttcacaccattctcctgcctcagcctcccgagtagctaggactacaggcacccgccaccacgcccggctaattttttgtatttttagtagagacagggtttcaccgcgttagccagcatggtcttgctctcctgacctcgtgatccgccctcctcggcctcccaaagtgctggtattacaggcgtgagccacagtgcccggccttttttttttttttttttgagatggagtctcactctgttgcccagtctggagtgcagtggtgtgatctcggctcactgcaagctccgtctctcaggttcacaccattcttctgcctcagcctcccaagtagctggaactacaagcgtatgccacaatgccgggctaaattttttttatttttagtagaggcagggtttcactgtgttagccagaatggtctcaatctcctgaccttgtgatccacctgcctcagcctcccaaagtgctgggattacaggcatgagccaccgcgcccagcccaatcttttttttttctttctttcttttttctgagatgccatactcagagccatctgagtgtcagaaaacaggaccacccctcacaggaaatcctcttgttgatttgaagggcattagttttattaacgcctactctgaagcaggtactttgctaaaccctggaaatttaaagatgaataagactcaattcaagtctacccaggaagttaacttctaaagtaactaaagacaggattatcaaggtcttccataaaaaactaagttctacgtgaacagctatttaaagggctgaaaaaagtcatgttcaatgtcagtttggttttgcaacatgtcatgccaacattgatttcagctggggataagcaatactatatgcatatctgtacacttccatcctcatcccaatcctgctgttgaggttccaggccaaagggaggaagctctggaacctggcttcaaagggaggctggagtctgtagtgcaccatgctgcctgcatttgtgtttcttttgaaaaccctgggagataaaagagaaaggaatcaatgagtctgcagaatatctggtgccagctgcaggcatgagaacaagcacagtgcagagcctgggctgcacctgggtccacacagaaacaccatcagaacagggaggacaaagtggaggagtttactgtgaggtcaggcactgctgctccacagagggcaagactgcagatgtgccacattagcgatcagagatttaaacagttgccccgaggggatggggcatttcgggcagaacaaacctccatgcagggcacagaggcacggaaggacactgtgagcttacagggcagtgcaacaggatggaacttgtattttaggaaactacagagagctgcagagagctgagtcttgggaggtgggctgggccacattgtaaggggccttgaatatcaaaatatggagcagagactggctccaggcaaggtggggttaagggagttttttaaggagggagagacaatagcaacttgttctgtgtgaagaggacctggtgggggcctggggcctgggacaggaggagaggcttgcaggagtcagggcggggagacttgctttggaaatctgtagatgtatgccactcctagagtgggaatcttttttttcgagacagagtctcgctctgtcgccaggctggagtgcaatggtgtgatctcggctcactgcaacctccgcctcccgggttcaagtgattctcctgcctcagcctcccgaatagctgggactacaggtgcataccaccatgcctggctaatttttgtacttttagtagagacggggtttcaccatcttggccaggatggtctcaatctcttgacctcgtgatccacccacctcggcctctcaaactgctgggattacaggcagaagccactgcgctcggccaagagtgggaatctttacagctccgttttacatacagatctaattggaaggtaattcacaatcaagaataagttaatatagagaccatgtcatttggaatttaaccaattatttggaggtggtacagtagcacatttatctcttggtgtacattcaggttttgtcctttttttgtttctccttttctaaacagctatgattaaatcaaagtggtggtgattttgcagtgacaatgactctgctgcagaggcttcctgcgtctcagaacctgtgtccttccctagcctgaggccagagtatgagcgtgtcctccttcctcagagggagccctgcctccctgctcaagagtctctcctaggaaggggtgggcttgggaggctgccctggggtggccccaaggctcctaatgactggtgcctggcatttgccagcagcctcggccaggtgctcgtcaggactgcggggctgtgaggacacaacccagtagaaactggtcatttggtgagtcatatagcgggcatcgctcagccctggattagggtcacaaaaagatgaccctcaggaaaagtctcaccgaaagtggtcaatgtgggcctctgaaaatgggcccagagggaagagaggctggggagggaagagcttaggggatctgcagagctaacgacagagggacccaggatgagccaaggcctagtgggtcaacagaaggtgctggatgaagccgtgacaagaacatgtgttcaaggccgctcctcatggccatctagtttctgtcaggatcacaggctggggcacgtgcttctcctacggactgagggctgctttagaaactgatgtgttttcttatcagaacacttcttgtcacctctggagaacatcctggcctggtcatcagagcctccaagcgtcatgtgtcccctttaattcctatggggcgtccagcacatgcattgttcccggcagcctctggagggactcactctactcctcagtggaggggcacagccatgccgagaggaagcatgccccgtcacacatggccaactggctctctgcagaaaggggcagtgctgttccaaaggccctctcaggtggcttcacgtgacaggagagacaatgggcaatggaaataaccaggacaaagcctccaggctgcatctctaacacacaagatgctcagaagaacccaatttgatctgtgtggtgtaaatgaaaaatttgaggctgggcatggtggctcacacctttaatcccagcactttgggaggcttatgtgagaggatcacctgagcccaggagttcaagaccagcctcgacaacacagcaagaccctgtgtattagtccattctcacactgctataaagaaatacctgagactgggtaatttattaagaaaagaggtttaattgtctcaaggttctgcaggctatgcaggaagcatggcagcttctccttctggggaggcctcaggaagccttcaatcatggcagaaggggaaggggagtgagatctctcacccggcgggagcaggagcaatagaaagcaagcggggaggcgctgcacacttttaaacaaccagatctcacaagaactcactgtcgcaagaacagcaccaagacaatggtgttaaccattcatgagaaaccttccccataatccagtcacctcccaccaggccccacctccaccactagggattacagttcgacataagatttaggtggggacacagatccaaaccatatcaccttctctctactaaaaataataataataaaagccagatatggtggcaccacctgtagtcccagctactcaggaggctgaagcaggaggatcacttaagcccaggagttcaaggctgcattgagctatgatggcaccacagcctaaacaacagagtgaggccctgtctcaaaacaaaaacaaacaaacaaaaaactgatttggatttgtatttcagtcttctgttttctgttctttaatacccttattaaagaaaccggatgtgaggcggcgcagcggcggtcaggtgagcgacgcgggagcggtcagcaggtggcgaacccacggccaggcttccgtggcaagcagccctagaggaatggccgtcctgtccctgcgagcccctgggccctggcaggcgatccaggtgggatgccatggaatatgatgagaagctggcccggttccggcaggcccacctcaaccccttcaacaagcagtctgggccgagacagcatgagctggggccctggggaggaggccccagacatcactcctgaagaggccctgcctgagctgccccctggggagccggagttccgttgccctgaacgcgtgatggatctcggcctgtctgaggaccacttctcccgccctgtgctgcggcaggtgatcgaggagtgcaagcaggtgattctggagctgcccgagcagtcggagaagcagaaggatgccgtggtgtgactcatccacctctggctgaagctccaggagctgaaggaccccaatgaggatgagccaaacatctgagtgctccttgaacacggcttctacgaggagaagagcaagagcgtcaagcagacctgtgataagtgtaacaccatcatctgggggctcattcagacctggtacacctgcacagggtgttattactgctgtcacagcaagtgcttgaacctcatctccaagccctgtgtgagctccaaagtcagccaccaagctgaatacgaacttaacatctgccctgagacagggctggacagccaggattaccgctgtgctgagtgccaggcgcccatctctctgcagggtgtgcccagtgaggccaggcagtgtgactacaccggccagtactactgcagccattgccactggaacgacctggctgtcatccctgcatgcattgtacgcaactgggactttgcacctcgaaaggtttctcgctgcagcatgtgctacctggcgctgatggtgtctcggcccgtgctcaggctccgggagatcaaccttctgctgttcaactacgtggaggagctggtggagatttgcaagctgcgccaggacatcctgctcatgaagcggtacttcatcacttgcagggaggccatggaggctcgtctgttgctgcagctccaggatcagcagcattttgtggagaacgatgagatgtactctgtccaggacctcctggacgtgcatgccggccacctgggctgctcactcaccgagactcacacgctcttcaccaagcacatcaagctggaacgcgagcggtgccaggccaagggcttcgtgtgtgagctctgcagagagggcgatgtgctgttcccattcgacagccacacgtctgtatgcaccgactgctccaccgtcttccacagggactgctactacgacaactccaccacgtgtcccaagtgtgcccagctcagcctgaggaagcagtcactcttccaggagccaggtcctgacgtggaggcctagcgctgaggaacagtgctgggcaccccacctggcccaccgggacccaccctgccaacgtcaagttgttcgttctgctctggagacccctgggttgcggcccctggacccctccacccctgctgggccagagcgggtgggcagtgtcaaggcccgttgtctcccaggtgcttgctgggactcggggtggccgcacctggctgtcacctgggtgtgctgctgtgaggggtccttgcgtggcccccatccttcccccagtgcagaactccatgggcagggagttggggggatatctcacctcccccatggcacagagccctccacactcctgaaccagagcatccgggccctagagattccacagttcccatcctgaccaccctggaaactcatcaggccaagaccccgagagagcttcagaggagtgttgagtaacacctgaggatgcggctgcacacactcagccaagggccgagtctcacctgcagtggggtttcggctctgcctgggggctccatcactttcagccactcgtcgccttggggatttctggttgtccccagctggggctgttcacagttgtcacctgtagacctgcctctccctggcctgaggttcaaaggcctcattgggtggtcagtccagtggggtcacctgttgttcctgtacaacagcaaggaaggggaccatggagcttttccctgctgggtgctcctgctttggcccagcccagctttcctggtgctccaagctaggaggccatggccccagcctaaagagggtgtcctggtctccaggtgtggagcaaggactgtgcactgggggaggttccagttaggtgatgggatcctgcagtggtctggtggcatttcttggaaccagatttacccaaggagatctgtcctgctgcctgtggagggctccagatagctcagaaatgaccagccaatggccttttgtttgggggcctgagatcaagagctgagagtattcactcgactgagcccattcaggaagatcagggcaggggcgtgtgggaggtccctcactccacgggacagaggcccctggacagcagaggaaacctacagctctgggtgaggggatacttggctttggtgtttgcactttacagatcctgcggtccacgaggggcctcaggagaggatgtgtcaggaggtggcttcccagccttctgccttgggcagtgggggtgctcctatctgtccttttcccctacaccctggactgtgcttggctgttggtgcacatggttggcacacacggtgggcagagggaagagaatgccactgcttggatatttgtcctctttgaccagaaaacccaagaggagacacctcagtcagcagaaaggccgcctggctcactggctcattccaggagtgggagagacggcagggtctcctctttgccctccaccatcaggaaggggatggtgtcctctccccactgtggtggctttaggcaaggttcttactgtcagctctgcctcggtttccccatctggaaaatgggggcaggggtactgacctacgtcaggtggaacagtgagcagggagtcctttagagagtgtgatgtgaggttggatcaacagtgtgggttcctgtcctgcttccccttcctctttggggctgaggagggggttaaaggccaaatgctgtttcccaacaccccaaagtctgcacatgtctcttgaatgcatcacatttctgtcatatggatattagccattccgaaatctgtgtaatcaacttcacattattcaagttacaaatcactgtgtgcatagaaaaactgtgctggtatttgctggacaaagggttgggccccttttatttttacctgccacccagcatctcccccacctgccccttctgggtgatacagtctgtaaacagaatcacgtatgggtctttctatgggtccgtagcacagcaggaagagcctggtgccgccagcacctcatggaagaccacatatgggtggtcccacagcatgggaccaagctggcctgagggatgcccagttgtaacaatgctgctgtcactgtctcattaaatatatgtcctttaaaaaaaaaaaaaaaaaaaaaaaaaaaaaccagaaagaacccgcacagcttatcttcattttggtactccaatctcaatatcattttttaaattgcttcagcagtgggaagagattcccagggagatattgtgatattctccagccaaagctttattactaaggttcctgttgagggaaaattcaaatagaggaaaagcctcatatttattgtaagaaagtttaagggtagttgccaaaaaaaaaaaaaaatcccaaactcaatgcaaaattactgttgcagtatttttccattcttatatctgtaataataagcaaaatgatcaatgagccacatttcaacccttaaaataagtatacttaccaattactcaaagaagctcacagtaatctccaggctatcttgaacaaccaacctgctaaagatgccacaggtgcctcaacactgaaggaatcaggtctatgccagctcagctacttcctaaagttaaaccttggaatacacacacattgagtttctctacagctttaggatgcacagtggttgttattgttgctagacaagtccttgaagattatcctctgactcaaagctttaaagaaaaatcttactggaaaggaattctttggtgagatgtagatcagcatggcacgctgtaggcaacatttaggaaggaaggctgatttcttctctctcattccaactgcctttgtgatacctgcttgggcattgcccagggattccagcggtcagaggttctgtaggatggtttttctttttttttaaatcctgcctcaggtttatttgtacaaatagcacaggaggacaccagccccatgcatatagcagcccaggggtcacaccagtccttctgttctcagattgacagagacctctactctgaaggctgcctggtggcctggacacctttggaagcctgagctagaactgaagctggagctgcagactgggccttggtttgatccttggcctttggccggcagaacctgaaggatgacatttctagcagagctccagggaagtcttgctggacagggcatctcctctgccccacccttgctcctcgagtccaggctctttgcatggaggcccagtgaacatggctggagctctaaacttatgtgctggtggacaaaggtcagtgacaatcacaggacacccctcttaacctatgcatgtaacttaccagtggctctttggaaatatggcctcacctctgctctctagttcacagtgacttgaatgcctgggtgtcaggttaggacagggtcccatttcaggagctagcaaatggaagaaagcaggagggcaaggcagcaggcaggtgataatgtagactgtggccagatggagtaggttccaaccttggaccaccattcatctgctgtgtgaacagagggtggatacctttaagtggtaggggactctggctgggcacggtggctcacgcctataatcccagcacttcaggaggccaaggcgggtggattgcctgaggtcaggagtttgagaccagcctggccaacatgtcgaaaccccatctctactaaaaatgcaaaaattagctgggcatggtgacgggtgcctgtaatcccagctactcaggtggctgactgtgcatctgtggctggggtgggtgaggctttgtttggtatttttattgcctatttttctttttttatgctcaaagctactcctgggcaagttccctgactcttgaatctttttcaaaatttagctcttctgtaatatttaaacttagctaagttggccactatgcaagcctcctggatttccttccttcaagatattatagcatgactcttttgctaaatttgtattctcatgcaatattagcatgaggaaaattttacaacatttaaaaaagtgaatatagctactgataatgaatgttaagctacattgacattcattttggaattagtgatcacctactaagttgaaccacatgaaatttctgtggtgtaaatcaagtcggttgagtacaggtgacttcatatggttgaacctacaggtgaccctggatcactcctccactcctcattttgtaatccaagaaaaggactctcaggatgtgaagtaacttactcatggtcacataaattattaggcgttgacttagaaacatataatgtattttcttaactaagggagtgaaaaattcttattactactccatttacgaattgccttggctattcttgcatgtaaatagatatacacatacatacacacacacacacacacacacacacacacacacacacacatatatatatatatatatattttttttttgagacagagtttcgctattattgcccaggctggagtgcaatggcttgatctcagctcactgcaacctctgcctcccgggttcaagtgatccttctgcctcagcctccaaagtagctgggattacaggcatgtgccaccatgcgcagctaatttttgtatttttagtagagacagggtttcttcatgttggtcaggctggtctcaaactcccaacctcaggtgatctgcctgcctcagcctcccaaagtgctgggattacaggtgtgagccactgtgcctggcctcttgcatgtaaatattttgagatacaaattgaataatttcattttacttgagggataatttaggggaaagtaacatctttgtaatagtgagtcttgatacccaaggatgcaatgtatttaagtcttctatcatgcccttcagtggtgttttgaatatttcttcatggaaagcttaggacatttttaatttttttgtttcagattcaggggtcaatttttcctttattttgaactaattatgcatacatatgaacaattgttttctgaagttactttcacagggaagacctttactgaattttcttaatgttgtttttcaaggtactggcttatgtttccaagaaacaaataaagataattttactttgtttttaatgtttatgcttcttgttgtactcccttctctaagttaatgtgcctgataacttttgaaagtaagaatagagacacaggaaagaggccagaaggttggaataagggctaaataaagaaacttattgccaccaaaataaagacgaatccaggttaatcctctctggtattgacttgtgagaaaagatggacatcggcatgtaggaccttagaacgacaggaagaatgaagaaaagagcctcagagcacagcctggtgatatcatagaagacatgtatttaaggcatttcatctctcggtgacgacttgcttcaggtccttgcacatgcatatatggagagaagggtgtcaaagcacaatctcatgtttgctctgatttttctctctatgaattgtttttaatttccttttttcagagaccaacagatttgtagaaaatgaggcaagattatttacagaacattagcttctgtatataatgtttatatttatattatgacattttgttgacatggccaaaacgattttacctttaggtaaatagaagaactgcttgatcgaaaagatgcccacttttcaagagcacagttgaagggaacagttgaaggtgataatcacaataacataatggtaggaagaacagaaattgctgtgtgcttgctttatgccaagcattgagcacaactttgaaatggttaaatctcatttaatccccacaataataatgactgttttatagatgaagaaactagagtttacagaagggaaattactcaaatctacagtttataactggtttttattttcacagccaggtctgtaggactttaaagccccagcctaggcactacttttgtcctaaagatgtgcatttattgtctgtgatatgtaagagaccataaatattggtctcaatgcaaattaattttcaaagatctatcaacaaaagtaagcttggtaaaagatgattttaaacagaacattcagtaaagattaaacaagatgcacaatccaatcaaagaaaatgtgttaagtcctcacaggggcattttctacagatttacacatagcttttccatgtgaaaaggaaactatgtaattcttgtttagcttcctccatctaaagtgacacaatgtaccaaatagcttaaattaatggttagatttggttaattatcaaggcttcctctttgaaaatcataaatttattttactttttttttttttttttgaggcggagttttgctcttgttgcccaggctggagtgcagtggcgtgatctcggctcactgcaacctccgccttctggattgaagtgattcttctgcctcagccttccgagtagtggggattacaggcacccaccaccacacccagctaatttttgtatttttagtagagacagggttttaccaggttggccaggctggtctcgaactcctgacctcaggtgattcacctgcctcggcctcccaaagtgctgggattacaggtgtgagccaccgcacctgtccaaaaatcataaatttaacttggatatggaattaatttggccctttctttatttcagtgaaagacgtataaaaaattgcccccttatcaacacaaagggtttctcctgaccattatttccaggtatgcacagtctcctaactatgacaacagaaatcattctgaactccttccatttcccagggagaaaacagaagcaccttgggcagagtgaaaaagaaaccacctggagaggaggccctgcaacatgaacccatctttaggcccaagggcattctgacatctgaaatcaaagtcatgattgcctccatttctagaaaatgttccagaaatatttccaggatatataattattaaagcacaggctttgttgtctttaggcttggaaaggtctttgaaagttatttggattaaatcattagaaatttactaacactgatatcaagttaatggttaaaaacaaagctttgtccacccccaggcccaggagaaatgtgcacatatgttcaccaagagacgtgtacaagtattttcacaccaatattatgagccaaaaactcaaaacaacccaaatgttcacctaaagtggaataaacacagtattgtggcgttcctataacgaactactactacgcaacgagcacaaataaactctaactcccaataatgtgaccggatctcacaaacattgtattggaatacggaggccagacccaaaagaggatgttgtacatggatgaaatttatagaaaattcaaaaacaggcaaagctgatacatggtattagacagggcaatgattatccttagtgcagagggagacagtgactagaatgatgcatgagggaggttctgggtttctgggaatgttctgttactgttcgtgttaggaggaggggtgcaaagggtagtgacgaggcccaccctctggaccctgcagcatgagagagagtcttgatcctgatggcagaaaccatcccccgagcccagggccacccataggacagacaccacgaagccacattctgaggccagtctcagccattcttgctgccctccaaccctgtcccagccaaagatgaacctccaggggtggggaaggatggacagacagcatccaatgcactctgagagcctctgcacctgggtggatgaatctttgtgtccagggctggctgtcagtagatccaggctttcattcctagaagtggttagtttccaagattttcagaaaataatgtctaattataaaattttaaaaatatatagaagagtttttggccaggcatggtggctcatgcctgtaatcccaacactttgggaggccgaggtgagtgcatcacctgaggtcaggagttcaagaccagcctgaccaacatggagaaaccccgtctctgctaaaaaatacaaaattagttatgcgtggtggcacatgcctgtaatcccagttactcaggaggctgaggcaggagaatcacttgaacctgggaggcggaagttgcagtgagccgagatcatgccattgcactccaccctgggcaacaagagtgaaactctgtctaaaaaaaaaaaaaaaaaatatatatatatatatatacacacacacacacacacacacacacacacatatatatatagagagaggagttttataatagcaatacaaaatgaaaccatcatgtatttcacagataaatttaaaaactgaattaaaaagtatatcaaatcccatattttttcagtttgctggcctgaaataaagtaataatgtgaggtttaagtaatgtcaattattttcacaactataataccattcagtgtttatcctgtactctgtactctctttataattaaggatctatacagaccattacaaaacacttgagtgggctgaaaccattagggtccattctggaactattgttttcaatttgctctcccaacttgcatattcttatgtgttcagcatttcttattaaccctgtatttttgtccactcatttttcacttcttaaatttcactctatcttactgataatatttcaggcttcttctgagaaaacaagaggctgggcatgggtggcttatgcctggaatcccagcactttgggaggccaaggcgagcggatcacttgcatccagaagttcaagaccagcccgggcaacatgatgaaaccccatctctacaaaaaatacaaaaaattagctgggcatggtggcacactcctgtagtcccagctactcgggtggatcacttgagtgcagaaggtcaaggctgcaatgagccataatcgcaccactgcactccagactgggtgccagagtaagaccttgtctcaaaaaaaaaaaaaaaagaaaaaaaaaactaaattggaaattgctcagtttactcccttataactgctatagtatggatgtttttatgcaacaagagagctaagaaatccttctaacaatttcctgaagtagatcacaaatatcttactactctacaaaatttttattatttcttatacttaatgatatcgttattgatatatcatttcaaggcaagtagtaacagttgtcactggagaagttgtttatataagaagtgaaataatctgttaaacctcactttaagtgtgccagttttgatgctaggactaaggcaatgtgtatccaagtgtagatctgtgccagttatatcagaatcaaggatgcttattaaaaatgcaaactctcacatctgtaatcccagcactttgggaggccgaggtgggtggatcacctgaggtcaggagttcgagaccagcctgaacatggagaaaccctgtctctactaaaaatacaaaattggccgggtgtggtggcacatgcctgtaatcccaactactcgggaggctgaggcaggagaattgcttggacctgggaggcagaggttgcagtgagccgagatcacgccattgcactccagcctgggcaacaagagcaaaacttcatctcaaaaaaaaaaaaaaaaaaatgcaaactctcttgggccctttctcaaatgtgcaaaccataattctgtgccatggcctgggacctgcattttgacgtctaaagtgattttctttcacactgaagtttgagaacctttgatttaagatttctaccattagctactacaaggagaagaggaaaataattgttgattttagccaaaaagaacaaacagtctttttaatgtgagtcacttactccttgaaaatggcttagaaatccagaagacctggcctctactcctcactctgatttaatgtgtgaacttaagagtctcgtacatgtatccttccttccttccttccttccttccttcctttcttttttgagatggagtttcactcttgttgcccaagctggagtgcaatggcaatggcacaatctctgctcactgcaacctccgcctcccgggttcaagcgattctcctgcctcagcctcccaagtagctgggattacaggcatgcaccaccatgcctggctaattttgtactcttagtagagacaaggtttctccatgttggtcaccctggtctcgaactcctaacctcaggtgatccacccacctcggcctcccaaagtgctgggattacaggtgtcagccaccgcgcccagcccagacatttattttttctaggctctgctttctctgatctaaaataaggtggttgggattttattaatctatcaagtacaaacattttctttcttcccttgagtccacttccaggcagcaacaggacttgattctgcagcagatcctgtcctcatgaaaagtgctggctgagagcccggtggctcatgcctataatcccagcactttgggaggccaaggcaggaggattgcttaagcccaggagttggagtcccagctacttgggaggctgaggcagcgagctgagattgtgccagtgtactctagcttggcgacagagtaagactctgtctgaaaaacaaaacaaaacaagaaaaacgagaaactcttgggagctttatggccttgcccatcaccaagaatccaaaatacttaccctggccatctgagggcaagcttagagccccctactactaccacagctggtgctctcttgagagcaccacctcctggctggaggccaaccaactcaggtcattacagcaactcatgacagaacaactctgatcccaggaagcagaagacaacacctaattccactgcctgcaacaacttggctaaccagaggtctggagcgtgtccacctgacaacgtcactgctagcataaccagcattcaggaaagccagcacactaaacatatctacaaccagagactcttcatagagtctacttcacttccatgccacctccaccagagcaggtgctggtacccctggctgggacaccaggagacggatcacatcacaggactctttgcagacatcccccagcaccagcccagagcccgacagccccgctgggtggcaagacccagaagagcaataataatcactgcagttcagctctcaggaagccccatccttaggggaagggggagagcaccatctgaaacgataaccctgtgggacaaaagaatctgaacagcaggacttgaaagatcacaacagcttcccagcaatggatccaaaccaagaagaaatctctgaattgccagataaaagtctacacattgggtacaatgtatactgtttgggtgacgggtgcactaaaatcttagtaataaccactaaagaatttatcaatgtaacgaaaaaccacctgttccccaaaaactattgaaataaaaaattcaaaaaaaagaaaatctgttctccagctacaacagaagaaaattaccagttaagtaagtgaatttggtgaaactcacaaatatgtggaaattaaacgacatagtcctaagttatcaatgggtcaaaaaacagcacaaagaaaattcaaaatatgttgagattacttaacgtgaagatgcaacgtaccaaaaagtaggggattctgtgaaagagtacttagaggaaaacaggtatcagtcaatgtctatactaaaaaaggaagaaatatatcaacagcctaatatttgttaaaaacatttagaagcaaatgaactacctgcacaacctgaggcaaagaatgtatctgttgggggaaacaatgtacatgctgaaaagcctaagtggaaagactagggaattaaatgttatgagattagggctttgaaaaacatccaccaattcctgggaatttacagtttcatgtcaatattcaggatgatgtatagtcttacaacagacctagaaggtgaaggggttcatcaacactagacttgccttacaataaatgccaaagggatttctttaagttgaaaagataggatgctaataaaaaacaaaaagatataaaaatatatatctcactgttaaaggtaagtatgtagacacaaacaggataatggaatgctatgtgatagtggtatgtaaataattttaagcagaatataaacgttaaaaggcaaaaagcattgagaatatctgaggccacaaaaatttgttaatggatatacaatatataaaaaatgaaattctgatctaattaacataacatgagtggaggaaataaaagtacagagtatttgttgtttgttggtttgtttgtttgttttgagttggagtctcactctgttgcccaggctggagtggagtggcatgatatcagctcaccacaacctccacctcccaggtttaagcaattctcctgcctcagcctcccaagtagctggggttacaggcgtgtgccaccacacccagataatttttgtatttttagtagagacgtggtttcactatgttagtcaggctggtctcaaactcctgacctcaggtgatccacccgcctcagcctcccaaagtgctgggattacaggcatgagccaccacatctgaccaagtatagagtgtttgtatgtgattaaagttaagtggttgtccactgaaaactgatgactatgaagtataagaacttttatgcaagccccatggtaaccataaagaaaaactttcggctggccacagtggctcatgcctgtaatgccagcacgttgggaggctgaggcaggtggaccacgaggtcaggagttcaagaccagcctggccaagacggtgaaaccctgtctctactaaaaatacaaaaattaactgggcgtggtggcaggcacctgaattcccagctactcaggaggctgaggcagagaattgcttgaacccaggaggcagatgttgcagtgagccgagatcgtaccactgcactccagcctgggtggcagagcgagactctgtctcaaagaaaaaaaaaaaaaaaaaaagaggaaaaaagaaaaactttcactagatacataaaataaagagaaattaatctatataatcactaaaaacaaaaaatcaaatcacaaaggaagatagaaagcagaaagtgagggaaaaaaattgctgaacagaacatcattaaccaagtggcaatagtaagtcttaagtataattactttacatgcaaatagatcaaatgcatcaatccaaagatacagattgtccaaaaggatagaaaaccaagatccaacgatatgttgtcaacaacactcaccttagacttagtagaaggaaataaataaaaagattagaagaaaaataaataaagcagaaatgaagttgtatactttaaatacacataaggtttgtcaactatatctcaataaagctgtaaaaagaaaatgaaaaaatggtgcaaaattttatccgtgcaagaagaataagtcctagagatctattatacaacataggtcctacagtaaattttacagtactttatacttaaaaaacttggggctgggtgcagtggctcatgcctgtaatcccagcactttgggaggctgaggcaggcagaacatgaggtcaagagattgagaccatcctagccaacatggtgaaactccgtctctactaaagatacaaaaaattagctgggtgtggtggcacatgcctgtagtcccagctactcaggaggcagaggcaggaaaatcacttgaacccaggaggcggaggttgcagtgagccgagtgcgcaccactgcactctagcctggcaacagagcaagactctgtctaaaaaaaaaaaaaacacacacacaaaacaaaacaagacaaaacaaaacttgcctagaggtgtattttgtgttgtgtttttatcacataaaatataaataagagcactggggaaaattttggagttattggatatgtttacagaatagactgtgtttatggttttacagatacatacttatctccaaaactatccaacttacatattaaatatttactgctttttgtaagtcaatcattcttccataaactcattttgtaaaaggcagataaataatagaaggaaaaatagaaacaaagaacaggtgcaatgaatagaaaacagttaacaaatatggttgatattaatccagttatgccaataactaatcaatggtctaaattcatctattaaaagacagatgtagagtgaatcaaaaaacaaaatgcaactatatgtcatcttcaagaaacactctttaaatataaatacacatatagtttaaaagtaaaggtatacggaaacatatactatactaagactaattttaaaaaagcttgttttgagacagaggggactttagaacaaggaaattcatcagggataaacaggaacatttgttaattttaaaagggtcaatttttcaatcagtgatatcaatgtacatatatatgcctcaatgtatatgcccaatgacagagcatcaaaacacaaggcaaaaactgatagaactgcaaagagaactagatacatccagtattttagttgaagattttaatactctctatcagtaatagacagacatggcagacagaaaaatcaggaccgtcctagttgaactcccccagcataattaatcaactgaatataatagatatctatagaatacttccacccagcaacagaataagggaacgtctaccaggatacaccacattctaggccataacatatacattgaacaatgcaaaaaaaatagaaatcacaaaacgtatgttctatgttttcatacccaatggaatcaaactagaaatcagtaacagaaagatctggaaaatcccaagatacttggagatttaaagcatatgcttgtaagtaaaatatgggtcaaagaagacaacacaagataaattaaaattagaaatagtgtgagggtctctcataggggggcatattgtgatggtgagacagaaatcagtggcatccttgaaacggttgctgggaactgaacagcaccatcagcagagagggcatagtaggtccattggtggctaacctattagaggagatactgcgagtgaggtgcagctgcagacttgaggcagactccccaatggtgagggaagagcagcaaatgagtcataaccagggtctgaccgtaaggtggcaggatgtcagcaaaggcatgactagtgagctaaaaggccggctactgggtggtgtctgaaatgaccctatgataaaaactgtccatgacctgagagccgagtaattggtgaataggcctggagaagacacaattatgtgaggaactttgggaaacctgggacagcaaaagccatggcacactgaggcttggaaaaatggttccatggggatgtaaaaggagttgaaaggtctgggtggtagtaggcttggagttgctgcattgtgagcaatggcaggctagaatgggacaggaccgagaggactcagaactaagcagtaaggtctaaacacactgtgtgtgctggaggtgatgtcataggcacaaaaacttgatcttggaggtggcccaatcaaccattttgggtcctatccatctctaatggctgcaaagcacaactgagatgccaagtgtctctaggaggcacaggctgtagaaacagtgataagggtggcctaagggttaaactcaatgtggcctgaggagggtgaagagcctgaggccgactggttgtagattttgtctgcctgccttactctaaatatagccgcacaatttggactcgtgggggaaagggtgggagcagggtgagggataaaagactaccacacattgaatacagtatagactcttcggatgatgggtgcaccaaaatctcagaaatcaccactaaagaacttattcatgtaaccaaacaccatctgttccccaaaaacctactaaaatttttaaaaagtaacaatagcttaacagtgttgaaaagaatataacaatacaatagttctttcctgatacaattacattttcaattttattaatttaagggagtatatttgggaattcagaaaggtcaagggatgagtactctttagattttttaaaggaaacatcaattagaatcattttgttttgccataaataatgtcatatgctgtttagtacactggaaatttttcttctattatgtgacaaaaatcaaagatgtattccaaaaactaattttctcaacatcaaaatttataatatgagtaaattataattttaaaattttcccttagaaattcataccttcataatgttgatctccagaacaaggattgaatacattagtcagacatcagtttcttgatgttttgaataatatagtctggcaatttcttcggtttcttagccttctgtatataatacatggatgttgtccatattattgaaatgcaaatttattgaaaggatactagcatgtccactgagatttatagtgtatcagttttggaaaaatcccatctcattatatgaaactgtactgaaataagagcaaaacatttgcaaaccatatagcttcaagtaattagtgacttgttcaggtctgccccttaaatttttctgtttttggaagaaatcaatgagtacagactgttgaacttggatactccacatttaaagaatgccattttaaattccattcttcctgtaaaactaacattttacatccaaaaaaataagtaaatatagccccacaatttgatggaaatggcaggctgttgtatcatgtgggacgatggctcattcccattgagttgtgtggttagttgtcaatatgagggcccactgaacctctccctctttgttatcgggcagaaggacattatccacatagtgccacaagtggacatcaggtggcagtcagagggtagctagatctagtcattgcaaccttgagccagcagaggattgttgaggtagtccatcagatgcctcctaatggtgtactgtcagccttcaaatctgaaggtgaactgcacctgatcttcttcacaaatagacacaatagaacatgtttgccaggtcagtaacaaaaccaagagggagaagcattctgaacttcttccaagacaatgacaatgctgggtaaggggactctaaaaggaagtacagccttgttgaggttgcggtttttagcaatgagccttcattcctttccctggccttgagaaagggccattggtgagttaaaaggtgagatggtgggtttcagaacacaagctctattaactgggcagaccccctctgtgccttgcttgggtgatattatgaggtactgaccacctggaggagtctggggagctgtaaaagttcccagtaggcatgacgtacttccatgcaaagaacttggtgtggtgagaccctcagttggggaactgaagtgccagaatgtccaggccaatgataggaaatggtcactgagaaatgggcaggagaaacactggtgctcaagggagaaggatgagtcctaccttaacagtgagcatggcaggcatcctaagggctcatcttcctctcagtccatcaacgggcacaggaaggctggtgcactgcatgggcaaagcagagataagaatgacccattatccagtgtgtaataagactatacacgtctacaggtttgaccaccagacttggatgtgataatctgattgacacaggaaaaaaagcatttggctaaatccatcatatgattaaaaccctaaccaaactagaaattgaagagtacttccacaatctggtcaagtgcatctaagaaaacctatgataaacatcctcaactaagttagtgggtaaagaatgtttactccataagattggaaacaatacataaataatcactttgaccactttcatcaacattctactgaaggattttgctcaagaaataatgctaggaaaaaaatcagccaatggctcttcaaaacacttaacgtggaaaggacaccctattcactaagtggttctgggaatagtggctgaccatatgcttaagaatgaaactggacccctctcactcacctgtacaaaaattaactcaagatagattaaaggcctaaatgtaagacctaaaactataaagatcctaggagaaaacctaggaaaactcttccagacacgggaatgctcatacattgttggtgggtatgtcaattagttcaacttctatggaaaaagtagggaggtatctcaaagaactaaaagtacaactacctttcgacccagcaatcccactactgggtatctacccaaagggaaagaaatcattatataaaaaggcactgcactcccatgtttatcgcagcataacttacaacagcaaggtcatggaaccaaggtaagtatccaccaacggttcattaaataaagaaaatgtggtgcatatacaccacaaagtactaggcagtcataaaaaagaacaaaatcatgtcctttgcagcaacacagatgcagctgaaggtcattatcctacgtgaatgcagaaacagccaaatactgcatgttctcatgaagatggagagaatacactgtggggactcaaaaagttggggggaagagttgaaaacgtacctactgggtacaacctccaatatttgggtgatgggtatgctagaagttcaaccccccccccattgtgcatgtgatatacatataacaaacaagcacgtgtaccttctgaatctaaaataaaatagaaaaagaaaaaagccaaagaaaaacatcccgggaatccagggagcagcggctactgcctccactgctcactgcagcccgcaggttccacgccggcagctcctgcctgcgggcagtggagctgcggagaatggcgggatgggtctaggtgccagggccagagcccaggaggggcgctgagtgggggtctggccggcttctgccttgcaccggagcaggggtgcctggtgaaacagtcaacctgatgctctctgggccttgcccacgttccacttccatccaccctcctttgcatctttctgtgcctggggcccccataggaagcggtcacatccagactcaccaggcctgagatgctggaggatggagaagcgcttgccacgggaaaaatcctccaggaacacatgaacaaaacttcgcctgcacctgggacatccttccttacggctggcctacgaggcaagtgttctgcacacgctccttggctaactccaatgcagaggagcacatgagcccaaccgccatggcaggtgcagatctttgcctcccttttacaatgactgtattcactcaaatgacatatcctggaagcctctttctgataggatgagagcagactctgtactacaacacagattggataagtctccaactccgattagtgaagattatccagtcagagatggagactattatccaataagagttgtcaaaaaaagttccttctcacccaatcagaaccaagcttacaagtacagcagttgcgtacagccatgataaaagggaggtgaaggcccatttcgcgattttcttttcgtggaggttgggctcgcgtgtttctctgcgctgtggtcgtcatggaccggaagcgtgtgcagcgcgcctgccttgaggccagcatcagggaagggtgttcccaggtgcagaggaagtgtccttcacgtgttcctggaggactttcggctcgcaagcgcttctccattctcccagcgtctcgggcctggtgagtctggatgtgagcgcatcccacggggcccaaggcacagagagagagagaggaacggggtggagggagggaagcgtgtgcaggggccaggagcgccaggctgctctggcttcccggcccccgcagcccgccaggagctgtggcccggcttgggccaaggcagaggcccgccctcctgctgctggcgctgtcacctccctgtggtcctgccttctgggtccctgagggccttctgtcatctggaactggaaataagttagtgaagcgaagttttgtgaatatttattggcttttgcgtctttgtcttcattttcagtgctggcttttctgttgggtcatttgtgttcttacgttgatttgaagaatttaaaaaggtattctataaattaatcctttacggggtcatttctagtgcagatagttgtttcttagtctggtcattgtaccttaattttatttaacatttctttcttgctgtacagtatatttacatatgctgtaaatcataagtttttctcctatttttctgcaaataggatattttacatgagctatttttggatgttaactaatcctgacttttttagtatatcccacttcgtatccatgtgttacattttcatatgtggtttaattcatatgtttttttttagaatatttgtatttctgttaatgaaagagagggcctataattttttttctaatgtcctgttcagattgtggtgccaacgtaatgctggcttcacaaaacaaactgaaaaatatttcctgtatttcttctctttggaagagtctgagaaatttaggtgttttctgccttaaatatttggaatatttctttaggtatggaattttccatgtggaacagtatttttgttggctggtttgacttctaataattcaaatcctttggtatatgtaggagttttcttgttttatgttatttctgtgcccattttactaagtttatttttatttttatttttatttttggggggacagaatctcgctctgtctcccaggctagagtgcagtggcacgatctcggctcactgcaacttccgcctcccggatttctccagcctcagcctcctgagtagctgggattacaggtgcgtgccaccacgcactgctaatttttgtgtttctagtacacatggggtttcactatgttggccaggctgatctcgaactcctgacctcgtgacccacctgcctcagcctcccaaagtgctgggattacaggtgtgagccaccgtgcccgcctgtattttttagtagagatggggtttcggcatgttggccaggctggtctcaaactcctggcctcaggtgatccaccaacctcaacctcccaaagtgctgggattacagtcgtgagccaccgtgttcggcctaggaagtttatttttcaatgtaatgttatttgaatctctgttgtcaaacttctagtcctaagtatttcacagaaccctcctagtgtcttaataatacactgctctatagggcaggcttctgttttggttcctgatagtgatattttgtgtcttttctctttgccttaattagtttcactagtggtttattaagtatattaatatttataagccaacttttttttttttttgagaaggagtcttgctctgttgcccaggctggagtgcagtggtggggtctcggctcactgcaagctccacctcctgggttcacaccattctcctgcctcagcctcctgggtagctgggactgcaggtgtccaccaccacacctggctaattttttgtatttttagtagacacggggtttcaccgtgttagccaggatgatctctatctcctgacctcatgatccgcccgcctcagcctcccaaagtgctgggattacaggtgtgagccaccgcgtccggccttataagccaacttttagccttgatttgtttctgttgcattcttttccctatttcattgatgtctactcttcattactttaattctgcattctttcattttgactgtttttaattcttgagaaggaaatttaagtgattgattgtcaatgtctttttctattctaacacattcccttaaggctgtaaatttctctctaagcagggatttatctgacagcccatattttccgtcagatgtttccaaaccttgtgtctgcagccgcattgacctcccagtgtctccaccctgtatcgcctacagccataccaggccttgtgtgtctccatcctcgtgcctgaagcctgtatcttctcaccagtatcaccatcccgtaatgactgaagcccatgtctgcccttgtgtattgtcacgtggtctgtcctctgcctgcactttatgcctctccatttcttgctcctgcagcccctgccagctgtgtgagtctctatgctgtgtgcttgcagcacattgcttgccttgaatgttgtcatctcctcagccttcaggcagtagcagtcctccagtgcctcaatccctgtgtttgcagcccattccgatgtttttgtctgtctgtcccctgagcttctgcccatgccagcttatgtttgctacattctctgtccccctaatccatgtccacagtcagtgttttcatccatgctttttgggccatgtctgcactggtgtgtctccttcccctgtgccttcagcccatttctttcctttttctggatcatttctcccaggagactatgcccaaaacttctatccccagtgtttgtacctgcagccagtctctttcgttgggtatctccatctgttgttactgcagcagaggcctgccattgagtgtgcctgcttcccatgcctgtcttcctgtgtctccagcccttgtccatgcagcccacattaggactcttgtgactccacccttcagcctacagccacatctcccttcgggtgtctttatctctgtgccctctgcccacgccaaccgtcacctactcctctttcctgcacctgtacccatgtctgtccctggtgtgcctctctgccatgcagctgtagccagcgagctccctttttgtctggatcccctgtgactgtagcccaggtcttctctcctgtgactacaacccgtgtctgcccttgaatgtccccatcctctgtgcttgtcacccgtcagccaggcctagcatgtttccactctgtgactacacccatgtctgcctccagggtctccactcatggtgccacagtttggttcctggtccctatcctcctggggtggattctggcattgtgttgggagggagaaggtgacccatgaaagggaagcctggaatgatgtaatgggcaaggaggctgccattcagcaggctgcacagtggcagagaagacatggccagtcagaatcctccctgcatcggggcactcacgtgggtctgtgcctggtgtggggagtaaggggaagctggagcaggaggtttggagccacctggccctcttgggcctgagaccctcccaactacaggggctccgtcacttccccggtggtcctgcctcctgggatcctgccctgcagtgtttctgcagggatcctctcacctggaacttgcagtggcgggtttcatgtgaggtagagtttagcaaatgtttattggcttctgtgccttacttttcttcatatgctttgcgtattttgtgtgtttttctagggtccttttttaatattgatttgaaggatttatcttaaatctgcacattgatcctttattggctcatttttgtcatagatacttgttctctagtttgatcattattttctactggtttcatactagtatatagtaatctggttgataacaataatgtatccagtaagttattaattgtaacagttttggggttttcagggattgtctaggcatgtaatagtgtcatatacacataatgacaatttttttggtttaaaaattaatcctaatgcctttttatttcttactgtattgttttctccactacaatgctgactaaagagtgatagcaggcagcctagtctgttcctgcactgggggaaaaagcttcccataattctctattaattatgtttttgttattggctagtattagacttcttcagatatcagatttcatcaaattaaggaagttgcttttttttttttttttttttgagatggagtctcactcttgtcacccaggctggagtgcaatggctcgatctcagctcactgcaacctccacctcccaggttcaagtgttttctcctgcctcagcttcctgagtaactgggattacaggcacccaccaccatgcctggctaatttttgtatttttagtagagacggggtttcaccatgttggccaggctggtcttgaattcctgacctcaggtgatccccccgcctctgcctcccaaagtgctgagccacgtgcctgagccacgctcagctaattttgtatttttagtagagatggggtttctccatgttggtcaggctggtctcgaactcccgacctcaggtgatctgcctgcctcagcctcccaaagtgctgggattacaggtgtgagccatcgcgcctggccagtcctctttttatattttactcaagtttttttgtgtgtttgtggttcagttttaaattttattaaatgctttaaaaaacttttcagctaaatgatcttactattttctcctgtatttttctgctaatgggatgacttacacgattcattttgaatgttaaggaccttgcattttggtgtatattccatttagtattgatctactgtattttcataggtgacttcattcatataatattttgcttagaatatttgtagctctgttttatttatttatttttgagacagagtcttgctctgtcgcccaggctggagtgcagtggtgcgatctgggctcactgcaagctccgcctcctgggttcacgccattctcctgcctcagcctcccaagtagctgggactacaggcgcccaccaccatgcccggctaagttttttttttgtatttttagtagagacagggtttcacgtgttagccaggatggtctcgatctcctgacctcgtgatccgcccacctcggcctcccaaagtgctggaattacaggcatgagccaccatgcccggccccagctctgtttattaaaaaggagatacatactgtttatgaaagaggtgacataattttgtttatttgtgtcccataatgtgtcctggtccaattgtgtcctcaatgtaatgccagctacacaaaaaattttttaaatattatctttattttcattttagtgtttttctttgtatggactattctataattatgagctgggaatttttcattgttcagttgtttttctgatttttggtagactggacaaaaacctgtgtttcctgaccatttgcatctcctctcctgctctgtgcactatctccctgctccagctgcttcccggagcctccctccttcctctccacctgcccgcgtcctccttgtccttcagtttcttcctaagggcccatgggctttctttggcttttacgttcctctcactccacctttgacagttgctgggcttcccatcccctgggaggtttcagaggatggggaagacagaggagtgcagttgccatgcagtgcaatatgggccataatgttcatcctccacggcctgtattgaggacttgctgtgtgccaagaatctgctctaagaatgtaactgtgctccctcacttcatgctcataaccacctgtgagatgggcaatgttctcatccacttttatgcagagaacacagaggcacagaggagtttcataaattgctaccaaggccttccgctggtgtgcagcagggtcaaacccaggctgtctggccctggggttcagcctctcaagtgctctgctagatgttggacaggacaaacgagacacagagaatgaacaccacctgacttgggctggggaagtcagggatggcttcctggaggaggtgacaacctcagtggaaccttgaaggaggagcaggaggagctgaccaggcaatgaataagtatgtccaggaaaaagggaaggcctgagtgatgctgggaggctggagagctggccttgggtgtgtggcggaggggggcaggagatcaggaccaagggtttggccaaggccagatctagaagactcgggccatcccatagttgataccttatcccagggccaggcaggccttccactgctctgtgcgcactggtgggcagtgcctcatgggatgctagaagcctagaccccagccacccacctgggctcctgagacccgaggtgcaggcacggggctgggaggggttgcagctgatttacattcaacagattgaggggaaaactgcaggtgcctcgctgtccagatggaacccaccgccagatggaccccggagacagcctagattcacagcctttccctgctgctctgtccccacaccccaggcggggagcaaatcttttctctgatcatcttttgtgctcaccacccatatcccggacatgtacccgaccaggggctcaaatacatacagtttctgagcgagctggataaggcagtgaccagaggctgcctcgacataggatgaaattgcccagtgctctggcaccacgagtcggaacccagccagaactgtgacctggcagtggcagaagctgtctggtgctgccaaatcagccctggccagttgttcattgaccccctctgggaccttggctgagccacttcccctcagctgtaaaatgaagaagactgtctttcctattagatatccctcaaaaacacaaaagtgctttgaacctgccaggctccctcttgaagagtcacaagaaaaggctctgagaagtcctgcagttaaaaaaattttttgactttctttaacccaacatttttcaagctaattgaccacagagctctttcttggtgcaacacctgttaaccggccaagtgtgtgaggaggcacaagtagagagctctgagaatcaccctccttggctgctctctggtctcagggtgcaggaaagagtctctgtgctacatcccagtctgcagtagttcagggtgtgagcccagcccacagagctagtgtcagagaggaattccttttcttccctttctgttaatggagcttctccctcaagcttctactccgcctggctggtgtcagtcttagggttttcatgctcctctttgggcttgatgggggttctggggttttatgtaggtcgagatagtggtagaggaggaagggcatggacagcttctctgatcagttgggcatctgccatcgggtcagtcaggcattatctccccctcaggtccggtggctttggtggcttccaggccatgaatgggccctggagcctccccaaggctgcccttgtcacataagatccactgccggacttactcagccactgcttcacactatggcagggtgggtggtagctccctccttctccactccccagcccaaactgggggagaattaggagtctgtttttaattttgtttgatcctttgattttagatttgcttttgaatagatagtatagtcagatggtttgaaactcagaatgtattgaaagattattaataaagtcttttttccatctttgtccaccaactgctcccttctcgcctcccctcgaataagcagttttcttaagatgtaatttccatgccataaagttcacctgtgtaaagtgtacaagtctgttttttagtgtatttacacagttatgcaacaatcaccctaactaattttagaacatattgatcaccccaaaaagaaaccttgtcaatcttcattcctcccctaccctaggctaccactaatttattatctgtctctatagatttgcctgttttggacattttccataaatggaatcatacaatatgtgatgtattgtgactagcttcttccatttggcataatgttttcaagggccgtccatgttgtagcaggtatcagtacttgcttcagttttgtggctaagtaacattccactttatggatatgtcatatggcttttccagtcatcggtggatggacatttgggttgtttctacttttttggtcactgtgattgttaacaatgcctccatgaataataatgcctccatgaacttttgggttcaagttttgggtgaacatgtttcatttctcttgagtagatggatacctagaagtggaattactgggtcatatgataattctacatttagcattttaaggacctgccaaactgctttccagagcagctgcactattttataatttacttcgtgcacgagggttccgatttctccacatcttcaccgacacttgttattgaccatctttctcactctagccttcccagggggtatgagatggtatctcagtgtggtttgggtttgcatttccctagtgacaaatgatgttgagcatcttttcatgtgcttgttgtccagtcatgtgtcttttatggtaaaatgtctcttgaaatttgtcttttcgttattctgttataagcattctttatattaatatattctggatactaatatattctggatactcttacttagcaatgaagactatttgcagtatgggtccaacctgcgttccagttggaatgtcctagtcacctatgcatccaccccaacaaatactgccagagagcctaccatgcgtatatatggcagagtccctggcctcaggaagcccacggtctagtccagacagacgacaccacccacgttctttgaacttccacttctctctagatttcttgagccaactaacaactctcaagtactttgcctattcagtattgttttttacagcccttaatttcattttgcacactacttactgttgagttttaggagttctttatgtattctggatatcaatcccttagcaaatatgtgatttgcaaatatttgattctattctgtgacttgtctttttactctctcagtagtatcctttggtcctattaaaattaaaacaagttataattttcatgaagttcaatttatctaatttttttctttcattgtctatgcctttgttgccatatccaaagtatcatttccaaattcagttgatggagaattttctcctatgttttcttttaaaacatttatagttttagcctgtagcccattttgagttaatttttgtgtgtggtgtcagataaggattcagcttcattctcatgcacatggatagccagtttttccagcgtaatttgttgaagagactgtccttttccccattgagtggaattgttagtgttttttacatagaagattatgttgtctgtgaacagagatattcttatgctctcctttccagtgtttatacctttatttctttttcttgcataagtgctctggctatgttgaagagaagtgacatgtgtgcattctgatctcgttcctgatcttaggggaaagctttcactctttcaccactgagaatgttgttagctgtgggattctcaaatatggcctttatcatgatagggaagttactttctatcctagtttcttgtgtttttatcatgaaaaaatattggattttttaaattgttttttctgcatcaactgagatgaacatagttttttctgtaattttttttttttttttttgagatggagtctcactctgtcacccaggctggagtgcagtggtgcaatctcagctcactgcaacctctgcctcctgggtttgagcgattctcctgcctcagcctcccaggtagctgggactacaggcacccgccaccacacccgtctaattttttgtatttttagtggagatggggtttcaccatgttagccaggatggtcttgatctcctgacctcatgatccacctgcctcagcctcccaaagtgctgggattacaggcatgagccaccatgcctggccttttaatttttttaatatggtgcattttactgatttttttttatgttgaaccatctttgcactccaggaataaattccacttggttatggtgaataatttctttgatatgctgttgggttcactttgctaatattttattgagaatttttgcatctaaatacttaaggcatattggtctgtaattttcttttttgtgatggcttcattgggctttggtatcagtgtaatgctgactttatagagtgagttaggaagtgttccctcctctttgatttttgggaagagtttgagaagaattagagttgattcttcaaatgttttggtggggttcactagtaaagcaatctggtcttgtgcttgtcattggttttttttttttttttttttttttgacaaagttttgctcttgttgcccagggtggagtccaatggtacaatgtcggctcactgcaacctctgcctcccgggttcaagcgattctcctgcctcaacctcttgagtagctgggattacaggcatgtgccaccacacctggctaatttttgtatttttagtagagacagggtttctccatgttggtcaggctggtcttgaactcccgacctcaagtgatctgcctgcctcggcctcccaaagtgctaggattaaaggtgtgagccaccacacctggccagtaggtttcttattactgactcagtctcctcacttcctcactagttgtaggtctattcagattttctgtttcttaatgtgtcagttttggtagattgtgtgtttctaggaatatgcccattttatccaggttataaaatttattggtatactgctgttcatagtattctcttataatcttttttattttcataaaataagtaatactgtttccaatttcacttctgattttaataatttgagtcttctctctttttcttagtaaatttcccttctgattttgatgatttgagttttctctttttcttaacaaatttcatttctgattttgataatttgagtcttctttttattagtctagctaatgtgttgctaattttgttgatcttttaaagagctagcttttggttttattgattttctctattgtttttccatctgtatgttgtttatctctgctgtaatcattatttccatctgctagctttgggtttggtttgctcttccttttctatttcctcaaggtgtataattaggttatgatctggttatgtttcttctttttcagtgtatgcgtttacataaacttccctcttcacattgttttattgtatcccataacttttggcatgttgccttttcattttcctttgtctcaagatattttcaaatttcccttgtcatttcttctttgaccagttgaagaagagtgtgtttaatttccacatgtgtgaattttccagttctccttctgttattgatttgtagttttataacattgtgatcagaaaagatactttgaattattttaaatttttaagaatgtgttaaggtttgttttgtggcctaacatgtggtctatcctggagaacgtaccatgtgcacttgagaggaatgtgtattctcctgttgtggggtagagtgttgtgtatatgtctgttgtgtccagttggtttgtagtgttgttcaagtcctgtattttcttattgatctgtctggttgttctactgttgaaagtgaagtattgaaatatcctagtattagtgtaagagtatttctccctttcattctgtcaatttttaaaaatatattttgggatcctgccattaggtttatataaatttataattgttatatcttcttgctgtgttcctttttatttttatttatttattttagatggagtttcactcttgttgcccaggctggagtgcaatggcgtgctctcagctcactgcagcctccacctccagggtgcaagtgatactcctgcctcagcctcccaagtagctggggttacaggcgcctggtaccacacctggctaattttttgttttttgttttttaagacagagtctcactctgtcaccaggctggagtgcagtggcgctgtctcggctcactgcaacttctgactcactggttcaagtgattctcctgcctcagcctcccaagtagctgggattataggcacatgccaccatgcccagctaatttttgtatttttgatagagacagggtttcaccctgttggccaggatggtctcgatctcctgaccaagtgatccacctgcctcggtttcctaaagtgctgggattacagacgtgagacaccgcgcctggccaattttttgtattttttagtagagacagaattttcaccatgttgaccaggctggtgtcgaactcctgacctcaggtgatccactcgcctcggcctcccaaagggctgggtttacagtcctgagccacctgcctggcttccctttgttaatatataccttaacaatgtatattttctcccattctataggttgtctgtttactctgttgatagtttcttctgaagacagtggaatactgtgcagcaactaaagtagccacctagcaggatgtgtaccagtatggatacattttgaaaacacagctaaaagcaaggtgcaagggcataataggcataagatggtgagggatagagcatattaccatgttacaaacccgacactctaaaagcacaatatagtatatataacattgtgtaaaacactcaaaacacccagaacaatactaggcattatcatggatacatacattatagtaaaagtgaaaaaccattcaagggatgaccacatagcaattttaggataatgcttattactctctgaggtgggagggtacattgaagctttaaaaaattcttcctagattaaaaagattttgcaagtgtggcaaaatttaacttgttaagtctgggtacctgtttatcattattcttggtagtttcctgtatatttaaaatattaacaatcaaaaattgcacaggtggaaggactgtactgtgccacttttctgcttctggtatgcgtatgtttcagtgctctgtgccttccactgtggttctctatcaggttcatagtgtatttctctaaagaaacattgtaacttactgctaagtatcttttggctaaggagattgaagatcagccttgcttcaggggtgttgttcacagcttagccgcagagggcgccaccccatagctgatgtgcggtggggcggccacaccaggcagccctcttggtacagggccagtgcctcccagggaagcactgctcccccagctgcaggaaagagaaatatttaagtgcgtgcagatttccctttcgcttgtaggaaggggtacagaatccagccatttggaagcatacatcatgtttctctgactgttcgtggcctcggctgtttctgaggctaataatgcaagaaacagcacatgccaaaggcgtctttgccactgtgtccatgagcctgctgctcacttgccaggggctttttgtgatgtattattttagattgagggggttcgtgtacaggtttgttacatgggtgtattgtgtcgtgatggggctttggcttgtagtggactgatcgctgtgggaactttgttgttaaaccgaccagggaactttccttttattttaagtggaaaaagaatattcatacctgaaggagatggataatcaccaagcagaacagctaaacagaaccagcctaaagctgcaagaagcatcatcagagagtgatgcagagatcaaagacatgaaagaaaccatgtttgcactggaagatcaggtggaacagcactgggttatcaagttacacagtactcaacttatcagtgagctaaaaaataagtggggtcaagcccaggtgaaatgtggattggaagtgagtaggacactaaagaacccagcagcagtgggtgactgtgggaaggtttttgactgtgtgttggctggggtttatgaagagtctttcatttgagtgtgctataatctcctgggaagaatgtcacctaagaaacaatcattaatctcttaaactaagttgaaaactggataacagaagaaaagagtaagcaacataagtgactgtgaaaaatagcaaatgctttgttgtttgttgttgttttagagagagggtctcagtctgttgcccagactggagtgcagtggtatgaccatactcaccacagcctcaaacttgtgggctcaagcgattgtcccaaatcagtctcccagagcactgggattacagatgtgaatcactgtacccagccacaaatgtttcttgtctgtgctagatgtgctgtgtgtgagccatgctgctgccactgtctctaagcagcctgatgggcttggaggccacaagttgggacacttcagctgtgactgtatgagagttcacagggacttttcctaaggacattctgtggggtaggaatgggttattcagaagaaataccttgccaagcattgacactgtgttgtcaccaagcattgacactgtgttgtctcttggagctgatagagatggatgataggtgtcagagtggatgaaaaatgtgtgctcttggtctaaagaagaaaacaattcctgcatgtgtgccattgatggtaggatatcaagtaacttacagatgttggccacttagttgctgaagaggcatcattatgaggcttatgagctcattgtttactttgacttgggaaaagaaatttttaaaagggattaaacgttgcctgctttgtccaaatgacctttatcaaattatcacatctaatgtgcttcgcttttgtgacaaaagacaatggacatggccaggtgtggtggctcacgcctgtaatcttagcactttgggaggtcgaggtggatggatcacctgaggtcaagagttcgagaccaacttggccaacatgatgaaaccttgtctctattaaaaatacaaaaattagccaggtgaggtggcgggtgcctgtaatcccagctacttaggaggctgaggcaggagaatcgcatgaacccaggaggtggaggttgcagtgagctgagatcacaccattgccctctagcctgggaaacagagtgaaactctgcctcaaaaaaaaaaaaaaagaaaaggtttaatgggcaaagcatttaggtcacaccagccattactaagaatagcctggtcagttgcctgagaagttccccacaccgtgcagttgatcctccttattcacagattcacagattgcacatttgtgaattcacctgcttgctaaaaatttttttttttttagttggagttttgctcttgttgcccaggctggagtgcaatggtgcaatcttggctcactggaggttatcctgcctcagcctcccgagtagctgggattacaggcatgcgccaccatgcccggctaattttgtatttttttagtagagatggagtttctccatgttggtcaggctggtcttgaactcccgacctcaggtgatccacccgccttggcctcccaaagtgctgagattacaggcatgagccactgcgtccagctgctcaaatgtattttaacccccaaatcaacacacagagtacttccacagagtcatttttgtcatttttggacatgcacagagaagtgaaaaagttgagtcatccagtgcttatgctccccactgaggtcagacagacactttaccttctcatgctgtacatatatcttttccatggtctgtttagtactgtgcttttagcattcttttgcttggttttggtgacttcgctgtttaaaatggccccaagtgcagtgctgcagtgctgtccactgtccctaagcgcagggaggctgagagagacctgcagagaagacacgtatgttagggaagtttcttgaaggcatgagctcctgtgctgttaagcctgagttactgaatcgacaacacagtacatcagagaaagggagaggaagttcgacaatatgtatgtaaagctgccctgacatgctaaagggacatctgtagagtgtgatgcagctgtggaaaagatggaaaagcagccaaatttatggattcatgagaagacagccaattttaaaaagcagtgggcaacattattgtgagactgaaaaccaaagacacgtacgtgcacatcgtctcaggtcaggaaaatattaaatccttcttggctagtgctggtcggctcctaggtttcaaaaggctgtaaggtgtgagaatggttaacgttgcaggcagggcaggttgtacagatcaggagactgaggaaaaatttaaaaatacttgctcagtgttaggaagaaggaaataggaagaatgagtttccactactgatgagacttgcttgttttatggagatattgccagatgcaactctgtgcacgaacctgagaattgactgtgtattccagatattgattagttggttagagtgagagttgacagcacctgcctcgtttcttcttgaacatgacacgcagtagaactgtggaacctcagcattcagtgtcggtgccatccaggctgttctcaggatacagctgaaaacctggacaccattatcatcagtgtatccttccaaacccagcaccatgattgtgaagaaaagtcaaagaagacaagttctgttctgttttgtttttgtttttgtgatattttgctgttgagaatggggttgtattgtccctaaatccttaaaagtcagcacagacacaccaagaaaaccagcgtataattaatgtccacagcaaaatttaggcccaccgctgtggttatatcatcatatatccaggactgacaataacccaagccatcttttgaaaagctgttaaactttttaaaaggattttgaagtattattcagatatctttttgctcagagaccccgagacacacggatccagccctagaccgatcactccttcccatgagatcctgatgggagagaaatggactgaaaaatgaaaggaaattagggggtgttttctactcagcagaataatcccagacgcagactcccaggcccactagaactagaactgctggggtaggacctgcccacaagcatctttttagccttctctggtgattctgattcacagccttcatagaaaactgctctaggttagagcatgacgacctattgaggaatttcagcttggtgactgacaccatcagatttaaactcgaatgactctgatagccgtatggagagaatgggaggcaaggagaacaaggggctgcaggtgtccttaagtagggagaggcaggcaagccacctgggaagatgtcaaacgcacacatcctcgggttctgtctgcccttggagattctgcctccaggtgtctggagtgtggactagaacatcggtgcttttgaaaagtttcaccaatgattcagaggcttaactgccattgagacccacgactctggaaagtgctttacaaaccacaggaggaataagcagtcatgtgctctgttatgtgaaagcctctatctcacagcaataaaggacactcaggatgattgcgtgtgagtgcgagggaggccgggctcggtgtgcaagtgtgtgtggccacggaggcctcttcccgtagtgctgctatttggttgtgcatcctgtctgctgagactgtaacctcaatatgcaccatgtatttttcagatcatcatgttccctattttggaggaacttgctgcttccagcccctctttgcagggtaaattgaaattgctaaaagttgcatttagagtagaatgcatttagagtagatttgaacacctgctgtggcatgtggagctgcccctttgctacctgacttaccttctctcaagagtctcacaactcttccaaggcctgtctgaattgtctatttctaggtaatgtgatcaagctggagaaacagaagtcagatctggggaggcagctaaagactctgactgagcagatacaggggagatgtggcaggagccttcaccaccatcttcctataaattacccctccaaagtcgggatcactctctctatcctgctttatcttggaacattttcatgacatgggccctgaaactgtaagttcttgccagcaggaagtaaagtcaaagcagtcatttgttgtcaggatggagagctctcataacctgaaggtgtaatttccaccagtgccttttcctagcagcaagacaccgtgaaagcagggcctcactaagcactgctggctgttctttcttggtgactgatacaggggctctggagtctctgctcaggcaccagccctggcaggcatctgacacagggttgggctctggcattttcagaaggagaccatggaatggaggtggttccagccagatctgcagactgcggtggcagtggccaacaatgtcaagtgagaagcccagcaggagctgggcactgtgaagaggaaactgctgaactgctggaggaggaggagaaggaggaggagaatgcctggctgcagaaggagctgggggatgtgcagggctgcggcagggtggtttccagcagagctgcccctccgtgagtctagtgggcacccaggccatgcttgcttttcacttaattactgtgcgtggggctccctggtggggatgagacgcttcatgtctctctgtgcaaggctctgctgtttcttttctgggatcagtctgcattaccagtgctaccgcatcactaggaacattccatccagtgcccagtttctgccatgcttagcagcataaggggctgctaagctcctcacttacatatgaagggcgagttctagccaagtatcctgctaggcttaaagaatagaagtcctgtctaggatgctccttgaatcttagtatttattagtgcagggagtgcacactgataaatacgagcccaccaccttgcacaggtcactcccatgcagtgggagaagctggaatcactcctgaggggaggagccaccaaataaggacacattcctcccggcccagggatgtgtctacttatttgacaacacccatgggctacttcaacaggccttgacataactcactttattttaaaaagagtggaaaacatgcatttggctgatgtatgacattcccctctgctctggacgggaagaaacacacagcctatcagcccagagagctctgctaatagtgacatttaagagtatttgggactacagttgcaccagacaagatcattactttatagccggacctctaccctctggccaccaaaggatgtggattttaggaaaactagattttgcagtgttccctgttgaaacagcagtgaggccattcagggtggcctctgtgtctgctgttgtttgtttgcctctgtcttgcttccctattgtctgtcattggaagaagatcccagtcagaacttgtgttgcttcacatggacgctattttaatgataaatggtaaaaggtaagtcctaagtttccatggtagccctgaataaccaggttcttgtatgagctgcttcatttcttatgtatactgtgagacacaggccataccatgcagtgtgaaccctggtattctaggaaatctccgcatgcatcctggcagtttaggactccctatgctgcatcctgcatcttcagtcttaacgtcattgtttttttaaacacagaattttcttttttgattttccggtgatttgcaacattactttctcaatatagcagtttaatcccttaccacaaaacatttcaaattttggaactgacaccaatgagaacgtgtcatggtactgaaatcaggcatcatgatgattttgcctgccattgtgtttggcaggaagtcagacaagtgccagtgatggtttcttgtctgattttgcacttctctggcaagctgtcacctctgaagagttgactattgggtaattactcgctcatggctcggtcactcctggaacctaccccatgagcaagaactagaaccaactcacaccctccaagctcccgaagccagccagtgtttccgtcttggctgaatgagttcttgattgaaactcaatttgactttggcagtcatctaatgagaactcaaaagtcatccttggttcagccacagcaaaagaacttgcagaacattctctgatgagatcttcaagtacaactgagagaaggtaagaacacccaaaaagcacctggatcctgacacgggattacctgattcttaaactgtttgcccccgtgggcactcacagggatggttgcagccaggctgataggcatgagatgaagcgcccaggcaggaatgcaaatcagcatttattaccggaactcagtgactacacagtgggatattatctaactcatcaatgatcttcagccctgttacacttcaaaaatatttttatttcagagttagaataactgatgttaaggtatatggggaaggaaggtggtagcctcgtctttgcagccaaccagcagtatctcattctcagcctcatgtttgcagccaactagcaatatctcgttcccagccccgtctcctgcctctgttaaaagaggtgggaaaagtgagtagttttcaaggtccgtttaagctctgctattctctggactggttggtcagctgacctttccctggtgggagagtcagaaattcctgtgccagccttagcatctttctgatgcaatcctttgaacctctttgacacagtggtttccccattgttgatgagcagtgcatgacacaaggcttctctaacagcagcggggaaagacctctgcatttactgtgtttgtttatttctcttgttctgaaacagtaaatgctgttatttcagggtgacttacctaattcttacagtgtttatataacaccagtaaacatccatggaaggaaaacatctttaaaagagatcattaaacacacttaacatctgtgcctaattaatgctattggtatctaaatagaatgtctgtgattcgaatgtgttttgcctgcaccaccagttcttgggttgtcccctctcggaggtgagcactgtggcagcacagcatgtgcagactccgctggaattggcttaactccgtgtgtgcacatcagtgtcagcccgagcgtcgctgcatgtgcccgcactgccctctgtgttgctctgatggctctaatgggtcacagccgcttagcacatgttctccagctgctgcggagaggggaagggcagaagttggaggtatagattcttgggtccctaaggtcccttttcaagctctcttgctgcagatgctctggtaccgagcccctgtcccaggtggagggggcccattccgctaaggattcctaaacagtttctgaacagacttcaccttagcacccatgacgaacaggggcttctggcatttaatttggcccttaatgtagaacctggtcctctcatatcctcttactctagccagccttatctgttgactcacatagtactttttttttatagtttagatttatgacatacacagtctataattctaaatagctgtgtctgcctccctattccctaatccgcatctttacagatttgaacggtgtggacataagcttctcttaggcctttaggatttttaggttgaaattatgaaagaaaaaaagttttttggccttgacagtagaggggaagcacaagcctctctgtaaattctggaggggcctgtggtgttcatcatgggcatctctgcttcaccacacagttctttgttggagaagttctggtggaggagcctagtacaggcatttgtagtctgacatttttttatgtccgaaaacctttggcttccaaaaaattggaacagtaggaattaaaacccattggcctgtcctggacattagcttgtccccgtagggcagtgtaagctggaaattcttgcgtttgtgaactaagaccgtgttgccttagggtaactcctttacagcctctccctccccatttctattttcacctctcagtgggctctgtcagctagcagagcatttggtggaagaaagacagcccagctcttcccatgattgggatccacagccatctctgtatgaaagggggaatgtgtagaagagaaattacctctttataaagagcccaggtgtctccttgtgacattcactgtttctcggaaccattgcctttgagtctgctttttgtccacattttggaatcagctcactgcatgatcaaagatgatccttcactcttttttctttttctcagaagcttcagcagtcttttatttggagaataaaatgaagttgtactgaaaaaagaaagtacaggtctcatgaagaagagttatttgcagctggaatgttgagaaggcacagtggcagagcagatctgagtaatgcttattccgaagaagtcaaaaagtttggcttccttctgtggggtcttgattgtgcctcttcacacagggtctgacttcattacctcatctgaaactaagtaccactaagctttggtttgatttccagaatcttgctgggctaaacgcaagtagatgtttcgttcattgttgggaataggcccccaaaatctggccataaactggcccccaaactggccataaacaaaatctctgcagcactgtgacatgtttgtgatggccatgacgcccacgctgaaggttgtgggtttaccggaatgaggacaaggaacacctggcccacccagggcagaaaaccgcttaaaggcgttcttaaaccacaaacaatagcatgatcgatctgtttaaggagagcatgctcctgctgctgataactagccagagcccatccctttatttcggcacatccctttgtttcccgtaaggaatagtcttagttaatctatatagaaacaatgcttatcactggcttgctgtcagtaaatatgtgggtaaatctctgtttgaggctctcagctctgaaggcttgagacccctgatttcccactccacacctctatgttgctgtgtgtgtgtctttaattcctctagtgccactgggttagggtctcccaaccaagctggtctcagcagttgatcataaaggatgctgttaagccagataggtaagcatggtgacagtggcaatagaaatctaatggaaaacggttgaatgacaactacaccaaaagcctcatggatgaaactcagcctggaaacttagtgttcaactcagagcgatccacaattttatgtggattttaaacttccagaaatgtgattttaaacttccgggaatacctgtgtttgtgaagatccaaatccatttcagcaacctccatcaggcagaaacctcctgcagttctcagcatggagctattagctatccaaaggaaagctagtatctattttatccaaaggatgagacaaggcaagagttactgtctaataaaaggaaaattaggaacaggagtgctctttaaactcaggaagatgttttggggtgtcaaaccagacagcacagaatcactagaaacattagcttggtgtgagaaagaagagacattgatatcttctgtgtaaaaataaatacttgcgagtaggactgtagattctgggagctctttatctcgtattcagagttgttgggatgatttaaaactcatttgctggatgtttttaaatataaacagtaagaaaactgcaacctcaacttaaaaggcaccactgtatttgcagcccacattttgtcctatctttactccaggtactgctgagtatttttatctgtaagcatttgtaaaatgctaaataatgttgttatacagaagctcgtctgctgcttaaggttttttttttttttttgagacggagtctcgctctatcgcccaggctggagtgcagtggcgcagtctcagctcactaacctccatctcccgggttcacgccattctcttgcctcagcctcctgagtagctgggactacaggtgctggccaccacacccagctaattttttatatttttagtagagacggagtttcaccgtgttggtcaggatggtctggatctcctgaccttgtgatctgtccacctcggcctcccagagtgctgggattacaggcgtgagccaccgcgcccggcctgctgcttgagttttaatcaccagctatgtttctgcagggcctttatgtcattttgttctacattttttcatgaatatagtttcagaacttcaaagcctcctcaaataatagaatttgaaggagaaacaagctggactttaaatataagttgtagatagaaggttgagctgggatatgaatgattttattattagaacaagaggacgtggagcaaaaacactagttttgcataaattaatttttaagcaaaactgtagaatctcagaaaatatagtatggactttttagtctagatgtttcttgttgaaatttaaaaatgaatagattggtgaattaatgtattggattttctcctaattatgaagtaatatttaggtatactggtagcaaaatggagatgtgtcaagaaaaatactaatctttctcctccttcagtactcaccctgcaaggaaatcactggtaacagtgtgtatattttttgttaatcataaaatgtataggcttcatttatatatgtttaaatataaacaggactatgttctacacagtatgctgcaccttcactttttatttcatgtaacatgggcatccttccaggtcaatacatacaaagagaactcattttaagagctgcatggccttccacaggagggatgtgccctggaatattcaaatattgtcttactaatgccagcaaggttatagttttctttgttacgaataatgctataatacgagtccttattcatatagtcctatatagttgtgattttatttttatagcatgaatttctaaaactatgactgctgctctagagaatatacacatttttatcttaatagatgtctccaggttactcacctgactgctgtgacatttcactttcttttttttgtttgtttttttgagatggagtctcgctctgtcgcccaggctggagtgcagtggcacgatcttggcttactgcaagctccgcctcccgggtccacaccattctcctgcctcagcctccggagtagctggaactacaggcgcccgccaccacgcccggctaattttttgtattttttagtagagacggggtttcaccgtgttagccaggatggtctcgatctcctgacctcgtgatcggcctgccttggcctcccaaagtgctgggattacaggcgtgagccaccgcacctggccgacatttcactcttgatgaacgtgcccatctctgcatagtctgagcagccacagaaagtgttgatcttatttttgccaataggataagtgaaaaatactatcttattagattttaatttgtatatctctgagcatatttttatgtgtactaaccaattgcactttctcttctagagttgctagtttagcacttttgcctattatttcactgagctgattgtttctttctcatcagtttataagtcagtattttattagggatgtcggggtttttttgtttcgttttgttttgggggggttgttttttgttgttgttgttttgagacagggtcttgctttgtcacccaggctggagtgcagtggcacgatcacagctcactgaagccttgacctcccaggcgcaaatgatcctcctactcagcctcccaaatagcggggacgacaggcgaacaccaccatgccttcctaattcgaatttttgtccagctgggatgtcactttattgccgaggctggtcttcaactcctgggcttgagtgatcctcccaccttagtctcccaaatcactggaattataattgtgaatcactgtgcttgcccaaagatgtgtttttatccccagtgcactacaggcctttggctttaacatccgtatcatagaaaagtttatatttttatataatgttaacttagtgttttcttttgttatttctttttgtttgtttgaaggttttccctctccaatcttatttgttacaaataaactattaagtttcattctctgttttatgcacgtgcacacacagacacacacacagatacacacacacacacacacacgcaggcgtttgatccacctttctttatttaatctgatgtgagctgtgcgtctttctctcccagttagatagctggtcatgccagcactattaccagaaccatcctttgtccactgaattgaaatcccacctttacatgattcatttcatctgcattcggagagaactgccctaagtatgcccccatttctttttcttttgagttagttctgctttaaaatattaatgagttattagattgcttatattatttttaactcacctttcattttaaattgtcatctttaatttatgtcttcttattttattgaattttaaggtagatactatcagtgtcaaattgtttctggtcatgaatttacaaatgttggtcctctcttgagtgcagtttccccttcactttgtattatgaaatatttgcatcggctgggcgtcgtggcttatgcctgtaatcccagcactctgggaggcctaggtgggtgaatcacctgaggtcaggagttcgagaccagcctggccaaaatggcgaaaccccgtctctacttaaaaaaatacaaaaattacctgggcgtagtggcacgtgcctgtaatcccagctacttgggaggctgaggctggagaatctcttgaacccaggtggaggttgcagtgagctgagattgtgccactgcactccagcctgggctacagagttagactgtatcacaaaaaataataataataataatttaaaaaagaaatatttgcatcaagcagggcattattttgttcatcaccttctcttgctgaagcagatccaggtgtggcagggcctgacgtttggcccaggtcagtgtctggatcctgctcagttccactgcctttacctgacagtgcttaggatcttatgactgaaatgcgttggaaggctcttgaaggtgcatatatattacatattgaaaggtacagaagctcaggtagagtagaaaagggtgagtgcctaacggggaaattcacctgtgcccagtttgttctctgcttggtgagcctggaatacagagccaactctctgggtctacatttgcatgcccctcgtccattttagatgcacgccatggcttttcctgccctgtcccttgtcactactgtcctttgtgtctggggtaaaccaaccttggcctcctcagatgtaaattcctcttgttcctgatcctttgccagaatgccctgcatctctctgggcttctcgtgctcctcaccagccctggccttctagggtgggggacattagtggagggtttcccttatctccattttctttggaagggatttggaggaaagctcttggtattttattttaatttcccccccaccacatactctctattagcagaaattcttcaaagtgtaggcttgtagatgatacctgactacaagatttttactgtttctttgattctttttgttcagatttgtagatgaagatgcttatgttcaaattgccatcttatcctgtttgattttattgttgaatatgcttatattgaaatttgaaagtgaaattcagaagatactgttttgacatctggagagagagtacttcataatttctgtctcacaatagagggacaaacttctcttagatttgttttgtgtaaaacaataagaagtatttagagaaaattacgctccaggcaagggcatagaatgagcaaaggcacagaggcaggacataaaagaaaaaaaacttcaggtggctgggtgtatagtccaaaaactagacgggtagaggggactcatgggagatcaatcgaaaggcctggggctgggcttcatccaggtgttcaggaaagatcccagcaggcatgagcatgtggttggcacaacctgccctcttcacaaatattaatctgccagttgtgaaggtagcagtggtgccatgcaacgcttcccaaatggagttacccttgaatacttaaaaaatcatcatgggctgggcatggtggctcacgcctgtaatcccagcattttgggaggccaaggtggatgaatcacttaatgtgatgagttcaagaccagcctggccaacatggcaaaaccctgtttctactaaacattaaaaaaaaaatcttgtataggagctcacctgtgcctggatcagaataaacaacataaagtggtgtcttgaggaagtaaaagctatagacaatcactggcagttgaagactctgttccctaatataacaaagaaagcaacaaatttagagaggttaaataaaagtttcaaagggaaataattacagacatatatgtatgtggtcttaaatgacaaggtaagacgtagaaggcagaccaacgttcagtgaggagggccgtgcatcttgttgtgctctgtggagacgctgcctgcttatagggtgcgtgcgtgtcacctgctgtgtgtgacacaccatcagaaagtctggcctccaaatgttattcacaggtatgggttgccaccttgtaagaacagattattgtacaaaaataggaatgttgaaagaaatattgggaatgttttttcttaaatattattatattttaagaagaaataccatcagcattatttttggaaccttgtatacctctcatagaacacttgtgcacaacagaaaatttgagaaaggcctggccagagctggatttgcatcccagatttaccattcatgaaccatgtgaccatcatcaaattttcctctaaaataagagataatgtgtggaggttttgtggaaaattaaattagataacatttttaagacacatggtactgtgcctgtcatatacagtggagttatactgtattagtttgttctcactttgctataaagaactactttgaggctgggcacagtggctcatgcctgtaattccagcactttgggaggccaaggcaggagagtcacttgatgtcaggaattcaagaccagcctggcaaacatgacaaaaccccatctctactaaacatacaaaaattagccaggcatgatggcatgcacctgtaatcccagctacttgggaggctgaggcaggagaatcgctggaatctgggaggcagaggttgcagtgagctgagattgcctcactgtattccagcctgggagacagagcaagacttagtctcaaaaaaaaaaaaaaaaaattgaattacctgagactgggtattttataaagaaaaaaggtttaattgccaggcacagtgactcacacttgtaattccagcactttgggaggctgaggcaggcagatcacaaggtcaggagatcgagatcatcgtggctaacacggtgaaactccgtctctgctaaaaatacaaaaatattagccgggcatggtggcgggtgcctgtagtcccagctactcaggaggctgaggcaggagaatggcatgaacccaggaggcagagcttgcagtgagccgagatcactccattgcaccccagcctgggcaacagagccaagactccatctcaaaaaaaaaaaaaaaaaaaggtttaattgactcacagttctacaggtcacacaggaagcatggctggggaggcatcaggaaacttacaatcatggtggaaggtgaaggggatgcaggtacatattcacatggctggcaggagagagagtgaatgaaacaggaggtgctacatactttcaaacaaccagatcccttgagaactcttaccgcaagacaacactaggaggacggtgctaaaccgttagaaactgcccccatgagccaatcacctctcactgggccccacctccaacaatgggaattacaattcaacatgagatttgggtggggacacagaaccaaaccatattatgtatgtatatttgtttcagtgaaattttctgttattaacatagttttatatgctggggacaagcagaacacatgcttcattttgttgtgttaaatgtagcccctaaacacaaagcaactatttcatcagtgatgtaactacagaaagagccaaactcagtggctcatgcatgtaatcccagcactttgggaagctgaggcagatgtatcgcttgagtccaggagttcaagaacatcctggacaatgtggcgaaaactcatctcttataaaaaaaaaaaaagaaaattagccaagtgtggtggtgcacatctctagtcccagctactctggaggctgaagtgggagaatcacttgagcctgggagattgaggctgcagtgagccaaggtgttgccactacactccagcctgagtgatccacctcggcctcccaaagtgctgggattacaggtgtgagccaccaggcctggacactaatagtattctttttttatttttatttttattttttattttgagacagtctcgctcagtcacccaggctggagtgggagtaatctccactcactgcaacctctgccttccgggttcacgtgattctcctgcttcagctttccaggtagctgggattacagatgtgtgccaccactcacaccgggctaatttttgtatttttagtagagacggggttttattctgttggtcaggctggtctcgaattcctgacctcaagtgatccacccgcctcggcctcccaaagtgctgggattacagacatgagccaccatgcccagccaccaatagcattcttaataacaattttctttggttattcagttcaggctttgttttgtgaatgcctcctacacacatacacctacacatacacatacacacacacacacacacacacacacacacacacacacacacacacacaattgctattatataacatggtgagtatttagtgagtatttctctaatctgcttaaatgatgcagggctttctcatactgactcgtattgttctagccaagcagactgagcattagaaataacattttaggatgcccaaagacaggggtactggaaattaatttttgtggccttgcttttttcttatacactctgaatgagtctatatatcattcaatattttgaattgcagagaaacttagataactgaaaggaatacctcagcagaatgtaggcttctctattttgttcttattaaattatcaaagaagaaaatgaacatgagttatttaaaatgattgtccttggaggcctttgggaccaagtcatttaaatggactgataagaaggtggcccattttgtgtcttgatgaccttcctgagaatggctggcacagacagagatttttttctcctcagacctaacctgatttcattctgtttctgcatatttgtcaacctgattttattctgtgtaacataaaggggaaaatgtgaaaaccagttcctgtcagtaaacctttaaaaattatttaaaagcccaaccccttacaatttgttaagttcctaatggtttcttccaatgaagttttcagttcactgatttttttttccactcagaagcaggggctgtgaagtcaagagtgtaagacagtgtgggttaactgttttaagttctgtttctgtgaaatgtattctattcatgtttacagagcaacagaggaaagcttagagaattaagtacaccgtaaatttaaccacagaagcttatgagtagctagattaacttcaaaacaatcagtaaataaatattttaaacttccactgacctttttaaaaatctacttccagatacgttgtttgaactattctcataaattagtcatcttgcaaaacagctgtgacaatatgatgtaatgaagagagcaatgatttagcagtcagaaggctgggagtccttgtcttggctcattcacagggagatcacatgacatgccaaagtcccctagataagggagccatacatgagaggattgaggattgggtcaatgatctatcataaaagactttctatgagtctgtgcttacacttagaaacctcacaaagaacacaccagggaatttgggtgagagcaggagcttcagctcatgcagaattgcagtgttattttagagttgtgttacgactcttaggcttagaagacagaatgtctgagtcaggattctgttgtgtataatggattgcactctcgttggcttagacggaaaagcgttaaatggcttgcagaattgttgggagggctgagcttccaggagcagctcccaaagtctccacacagaattggaccaccagggaacctgctccctccaccaggacaggagccttaacttcagaaagctgcccacccagttggaaagctgccaccacagttaccagcaccagaagcatcttgtctctgctacagtctctgtgcacatagtgaatgccctgtgccctgcctctctccccctgactcaggtgccactccgggtctcgctcaagtctttctgatgatggaacttaaatcacgcccaaaatcccagctgcaggagagctctgagatttcatctttccagcctctgtgtgccacctggggtttggagcatttgccaacaagccaatccactgcattcaccattgacaataagcaaaatgtttatgatcagtaacatttgcattttttcacaatttgcagcatacaggcttcttaattagagctaatgtcaagtcattctacatataaaaatatcatttttgaccgtttctcaagaaacagctttttaaaaaatcaagagcaatgcctacattatttcctgatgcaaagctggtagagaagataggatgttaaatttagaatttcccttccagctttgtttattttctccacatcagctctgttttcctctgtgtctttttctcccatggggacgtcctccaccttttcagtttgatttgacctttgctgtgcagacctgtggatgaagagccagagtcccccaaggtcgatgctgctggccagtggcctggtgtgtgtgttaacagaacatctccaacgccctcagagcccatgaccaccataagtcactcatcaagtcatttgacttgggatgccctggtatttaatcatttttttctataagcaaagttccaaattcaaactttggcccgacatatcaaacgtttcttgactgtaccctggccccacgttgttacaaccacaagggcactttccaggtactaccacatggagcggctgcaggcaggagcctggcccaggctccggggaggcactcatggagagcctgactcatgagtaacacaaaagcagcctcttcctctctacctcttcctcctctccagttcctgccttgcctcatttcttttctgcctctcatagccattaaattcaggtcactactatttgccattttcttatttcatgagaaatagcacggtcagccagaggcttcatctccaaggaaaccaggcgtcacaactgtgcacctgacccttttgtaggcacccttggccatccccatcttgcagcctgctagacatttttctacctggtcttgtatgtgagcacctgtgttgatctgtcacttctgatcttggtgtgctcccaggtttcctggaattttctgatagactcacaatacccctttagtcatgtttatcttcatgtatgagaaagatgcatagctatacttcatacatatactgtacacataaagatagcaaatagaagaaacaatatgcatctgtccactgtaacagtatctttcttcctggactgcaatgaacatgccattgtattgaaagactctagtaggctgggcacggtggctcacgcctgtaatcccagcactttgggaggccgaggcgggcggatcacgaggtcaggagattgagaccatcctggctaacatggtgaaaccccgtctctactaaaaatacaaaaaattagctgggcatggtggtgggtgcctgtagtcccagctgctcaggaggctgaggcaggaggatggcatgaaccgggaggcagaacttgcagtgagccgagatcgccccacttcactccagcctgggcaacagagcaacactctgtctcagaaaaaaaaaaaaaaaaaaaaaggctgtagtaaaaattaatcctagaatgtacccggttattatctctgctaaaatagtttgcaattaaattaaatgaagattaaactacatgtattgaaagacatgaaagcccagtgagtgagtcagtgaagatgggaagtgaattaacagtcacagtttgtgcaagaactttcctgttccttcctcccctaggcacctcattatttaaacatattcgttttactcagttgtcctacatctaggactagcctccactcagctaacaactcctcccctctcatttctccaattcagctctagtccagaggagaaaagaataataaatatcacactaaacaccatggaatacttctcaagtcaccaaagaggtaaatcaaaaagtattatttgctattttgaactggaacaacatgtaaatgttcccatctcttttcttggcagatggaactggacagaatacttctgtccataaggcccttagaagcctcctaagcgaaataccagtgaggacctccccagcagctgctgtctctcctgccaggtagatgagccccaggaataaccactgcttatggtttgttttatatccctctagatgtttttctttatacatatgtgtgtgtgtgtctgtgtctgtgtgtgtagagagagggtgtgtgttgtgtaaattggattatactacacattagtccaacacttactcatttcacgttatcattggaatgtgagctccgtggggaccaagatttttgtttattttgcttgctaacacatcttttgtcgataacagggagtgaaacatggtcacatcgtgatagaagctcaacaaatatttgttgaatgaataaaggaatatgtctgagacatctttacattgcaacatttggagaaatgattcctttttgtaaaggttacataatacacatcaatgtatatagccatacttctactgatagattttaggttacttggggtaaacaataaagtgaagatccttatgcaattttttgaccactaaaggggctatttctgcataagggtggatcaagattcatttgcaaatatgagagatcactgtagttaagcagaaagggatttaatccagggcatttggtactggaagggctggagaaggcagtaggctctgtccactgagcttccaggaagggttcccagagcatctcaatgctggtccagtaaaggagcttctgttcctgccagaatcaggaagtctttctgtaggtacatgcccaggtccaccactgctgccaagatctaggatcagccttgggaccacacagccacaggtgcagtccatgccagcacaccatgctctgtgcctgcctcatactgcccagaagatgatggaacagacccaagaatctccacttccctgccacagaacagcaaatgccttcccagccatgcttgccaggagaagctgcagaagggcagccttctactccctgtaccttccacatcctctgagaaggggcctgtttgacagaaactaggccacttaatgagccaagctttaaggactttggcaaatacaccccttagctttccagtctcatgtaagtcagtaagtcacccttcaaagagacgaggatggaatcaagtgagcctgtcctgagatcttccacacattgattcctagaaaaggaaaatggagtcctagaaaaggaagtgtatttgacctgtcctggcacgttgaaaaacttgatagacacattgccgtcagtttaccctcccactcatagcatgcaaggtactgttttcccagaattttcacactctataaattttaaagattaagtaaatgaacaataataacttgatttactttgtccttcagtaaggttgagcacttcatatgtttacagaccgtttatctatcttttatatgtgtgaatgaaaacttacatactttgcctgtatttattttgaggtattagtctttttcctatttgtaagaaatcttgatatattgtgctttttaacttttttatatgtaatgctattattttctttatctttgaactttgtttgaagttatattttactgaagaaaaatgttgcatcttgtattcagtgctttcctttatgattttaagtgttttgtttcctgccttaaaaagacctttctagctattagattatgaaaatattcttccttaacatcttaaagaagtcttttatttgttcagtcttaaaacccatagaaacatgggtttgaatttaagtgatctttccctatcttaactgacttctggactcagaagtaaatactctttgaaggaagattacatcatccagaacctcaacttatagccacattaaaaaaatatatggtgtcatagtcaattttaaaaatactaagtatacaaatagataataccaaatgatgaaaaaaacaagagaaaactaggcaacagaagcagacacaggagatccagatattagacacggactttaaaacaactgagattaatccagtaaagaaaataagtaacaaggtggataatttcagcagaaaaccacaatctataaaaaagaatccattagaaatgttataacttaaaaataaaatgcctaaatttaagactcaacaaagtttacctgtagattaaacattttcagagaggcttaaggaactaaagacaagttgatagaaatatctgaactgaagcgcagagaaaacaaagaataggaaatagagaaaaggacataagagctatatgggatggggtgaaaagatctaatgtgtaattggagtccccaaaagggaaaacaagaaaaacaagacagatagggcagaagcagtattggaagagataatggccaagaattttgaaaactaaacagatgttaagccctagattcaagaacaacatgaaccgaaagcaaagtaagtgcaaagaaaaccacctagacacattaggctaaaactgctagtaatgaaagagaaagcattgtaaaagcactcaaagggaaaaaagaaaccttaatatcaaaggagcaagagctaaaactgacatctgccttctcaacaaaaatgatggaagccagaagacaatgcagtggcgtctgcaaaatgcagaaggaatgcctgctttcctagaataccgtacttggtgaaaatacccttcaaaggtgaacacaaaaggaagatgctttcagtacaacaaaaacagatttcttttttaccagtgtacttgtgatgaaaagattatcttaaaaagttctgcacgaagtttgttcttttaaaagattattaaaattgatgaacctctgacgaggctgatataaagaaaaggcataaattagctatatcaggaatttttaaaggggtgtatcactaaagatcccataattatgaaaacagtgatgaggagattacagattagtgctctgtatagtactactctataaattagaaaatgttgatgaaatggtcaaaatcgtagaaaaacatcacttactaaactgacataaaaagtagtaggaaatcctgatagtctgtaatttaaataattttctcaaaggaaatgccaggaggcccagatggtttcatcatgaaatctcccaaacatttaaggaagaaataacaccagtcttatgtatattcatacagagactagaaaaagactagaaaaaagggtaaactttcttagatcatttaagaggccagtgtatcttcgatacctaattcttgcaaggacattaaaagacaggaaaattaaaaggtcagtgtctctcatgaacctccatgcaaaaatccagaacaaaatcttggaaaacctaattcagagatacatttatttatttatttacttatttatttttgagacggagtttcactcttgttgcccaggctggagtgcaatggcacgatcctggctcaccgcaacctccgcctcccaagttcaagtgattgtcctgcctcagcctcccgagtagctgggattacagccatgcgccaccaggcctggctaattttgtatttttagtggaggcggggtttctccatgtgggtcaggctggtctcgaactcctgacctcaggtgatctgcccacctcgacccccaaagtgctgggattacaggcgtgagccactgcgcctggcctcagagatacatttaaaagatcatgttaaattgggtttattcgaggaatgcaaggtggttttaactactgaaaccaaccagagttaatttaccacattaacaaaggtataaaaagtatagtcatcttattagatgataggaaaatatgttcaataaagattaatacctttcttaatgaaaagtcttagaaaactaggaatagaagggcaattccttaatctgatgaagggtctctattatatatctacatcatacatcatacttaatggtgaaatattggacgctttcccacaagattatgaatgagataggaatgccccatattgtcacttttgttcagctcatttcaaaagcaagatataaaactacttttgaaaactgtacaccattatatttacgtgagacatggatacatggaattgtgtttaatgcgatgtggagtaggacctctaagggaaagaatgctttggaaaacctcacaatggctctgctcactcatgtgcacagacagatgtaccaggatattcatttccttatgcttatatcaatatcaatgccagtattgacagagaatcgatcaaataaattatggtaatgaaaatagctaaaatctattgaatgtctactatgtaccaggccatgttttgattgttctaactggatttaactctttttttttttttttttttttttttgagacggagttttgcttgttgccctggctggagtgcaatggcaccatcttggcccactgcaacctccacctcctgggttcaagcaattctcctgcctcagcctcccaagtagctgggattacaggtctgcaccaccagacccggctaattctatatttttttagtagagatgggattttaccatgttggccaggctgctcttgaactcctgacctcaagtgatccacccgcctcggcctcccaaagtgctgggattacaggcatgagccaccacacccgaccagattgaactcatttaatcccccccaacaatcctctggggtaggtactatttatatcagtgccattttatagataaagaaaatgaagcacagaggatgaagtaacccagagttgtgcagctggttggtggctatgtggccccagagccctgtgcttggcctcttgtgtaacacttcccatgagaagccaccaaaaaggttagagaatgaccagtaagtgaaagaagcaaaacggtatgcaaagcaatggaatcctgtgataacatttgtgtttttagaataacagagggtttttcttcaagggttttccttgaataatatcactctcacctgcattctgaaatgcttttttttaatggtggtaaaacaaatacaccatgaaaactaccctcttaacaaatttttaagtacggttaactataagcacaatgttgtacagcagatctccagaaactttttctaaaatttcaactttatttcagattcagggtacatgtgcaggtttgttacatgggtatattgtgggatgctgaggtttggggtacaattgatcccatcatccaggtggtgagcatagtatccaataggtagtttttcaacctttgccccccaccccattctaccactctccaatgtctattgttgccatctttttgtcctctagaacttttttatcttgcttgactgaaactgtacccactgaacaactccccacttgccctccccacaacctctggcagccaccactctactctctgcttctgtgagtttgactactttagattcttcactgatacggtttcgctctgtgtccccacccaaatctcatctcgaattgtaatctccataatccccatgtgtctagggagggacttggtgggaagtgatggggtccatttcccccatgctgttcttgtgatagtgagtgctcacgagatctgatggttttataagtgtttgacagttcctggttttataagtgtttgacagttcctcctccacatgcactctgtctttctctgtccccgccttcccccaccttcctcctgccaccttgtgaagaaggtgcctatttccctttctaccatgattgtaagtctcctaaagcctcctcagccatgtgaaactgtgagtcaattaaacctctttataaattcccagtctcagggaaggtctttatagccgcgtgaaaactgactaatagtgtaaatttgtagcagtagagtcaggtactgctataaagatagcctgaaaatgtggaagtgactttggaactgggtaacaggcagaggttagaacagtttggagggctcagaacaagataggaagatgtgggaaagtttggaacttgctagagatttgttgaatggttttgaccaaaatgctgatacgatgtggaaaatgaagtccagggtgaggtggtctcagatggggttgaggaacttattgggatctggagcaaaggtcactcttgctgtcttttagcaaagagactgatggcattttgcccctgccttagagatctgtggaactttgaacttgagagaaatgatctgaaattggaacttatgtttcaaagggaagcagagcataaaagtttggaatatttgcagcctgacagtacaatagaaatgaaaaaccaactttctggagagatactcagaccagctgcagaaatttacataacaaggagccgaatgttaatcaccaaaacagtgggaaaaaatgtccccaggacatgtcagagatcttggtggcagcctgtcccatcacaggcccagagacctaggagttaaaaatggttttgtggcctgggcccagggccgccctgctctgtgcagccttgggacttggtgccctgtgtcccagctgctctagctccagtggtggctagaaggggccaatgtacagcttgggccattgcttcagagggtgcaagccccaagtcttggtggcttccatgtggtgttggacctgtgggtacacagaagtcaagaactgaggtttaggaacctctgtctagatttcagaggatgtatggaaatgcctggatgaccaggcagaagtctgctgcagggatggaaccctcatggagatcccctgctagggcagggcaaaagagaaatgtgaggttggtgcccccacacagaacccccctggggcactgcctagtggagctgtgagaagagggacactgtcctccagaccccagaatggtagatccactgacagtgtgtaccgtgcacccagaaaaaccacaggcactcaacaccagcccgtgaaagcagctagaaggggtgttgtaccctgtaaagccacagggatggagctgccgaagaccataggagcctaccccttggatcagtgtgacctgatgtgagacatggagtcaaggagatcgtttcagagctttaagatttgatgactgccccactgggttttggacttgcctggggcctgtggcttctttattttggtcaatttctcccatttggaacaggagcatttattcaatgcctgtactcccattgtatcttggaggtaactgacttgtttttatagcagtgtgaagtggactaatatactcacatacatggaatcatgcaacatttgtccttctgtgaccggcttctttgacttagcataatgtcttcaaggctcatttatgttgtagcatgagacaggatttcctttttatgggtgaatatctccattttatgggtaataatattccattgtatattatgtaccatcttttcttcatccattcatctggtggtggacacttgggttgcatccacctcttagcttttgtgaataacactgcaatgatcatgagagtgcaaatatctctttgagattctgttttcaattctttgggataaatacctagaagtggcattgctggatcatttggtagttctattgttatgtttttgaggaacctccatactgttttccataatggctacaccattgtacgctctcatgaacagtgcacaagggtttctctgcctcctcaccagcacttgtttttttctgggttttgatgatggccttcctaacaggtgtgaggtggcatgtcactgtggttttgatttgcatttccctgatgattagtgatgttgagcatcttttcatatacttgttggccattcaaaataaaatgcttttacacacgtccttgaatatacagagaacattccaggaaagatattcacaaagctgattagtaatgagtactcttgggaaggagaactggggtgcaggagtgaaagggagactttctcttcactatttgccctttttgtttcttttgaggattgtgtctattgcatatattacctatttgaataaatgagttaattaaaaactcccccagttattccactgtgtttaagaactgttggacacacacacgcgtgtgcacacacacacgcacctgtgttggtgctgttcttgatgttacaagctcaccattctgttgccccactggtttttacagaggcatctggcttagagcagtgtgcggtcggccagcaaagggatgactcaatgcttggaccttcctgaccttccccttacaggtaaattacataaacataaaagacttttgacttactgcagtttcaaccccagaataatggacgtgtcatggacgttagatccagcagtgcagctgacacaaggaataagtgtcttatctcctgccagctgcacctctcagtgtgcttgtgctagggagacagaaactttgttgctgatttttttaaagacatagggtcttgccttgttgcccaggctggtcttgaactcctggcctcaagcaatcctctcacctaagcctcccaaagcactgagatgtgaactaccatgcttggccaaaaaaaccattcttttagttgccaagatgcatactaaagttgagaccacaacaactattgccctgaagtaaatacctcattgacagtactcctcacttagccccctccaggcaccggtctgcttggatgattctatttactgtaataaaggatcacagtgacaattgcttgcttccagcaatcaccagaagttgcttgtcaacattgagatcatcagaagctgcagaaacagggattaatgggctgtttttgttgttctctttagtgatgtaaatactgtttttctctgctatttagagctaattagccccactcccaactttagtacccataattggtggctgtgagctgtagaaggattgttttcttccgtgactgtttgtgggtcatgggcagcaactgtgggcctggtctctggcttgctatgtagctctaaacaaagcacttagttctctcagctccagtttcccctataactataaactagacaatcttgaaaggtttatcctgttctatatttttatggtcctttacgaaatatcatctgaccaggtatcatggcatgctcctatagtcctagctactcagaaggctgaggtgggaggatcacttgagcccaggaggttaagtccaaatccagcctaggcaacatagcgaaattccatatctaaaaaagaaaaagaaatatcacctggaggattcagtctatttcattatctgttttgattgtgactaatatgacagcagaaagagccttgaaagaattaagggaggagaccacccctcatattgtcttatgcccaatttctgcctccaaagaaagaagaagtgaaaactaaaaggcagaaatgaaatccacagacagcccggcaccacaccctgggcctggtagttaaaaaatcgacccctgacctaatcggttatttgcataagaaaagcactgtgaagatccgtgtcctgttgtgttctgttctaattactggtgtatgcaacccccagtcaggtaccccctgcttgctcaatcgatcacgaccctctcatgcggacccccttagagttgtgagcccttaaaagggacaggaattgcttactcagggagctcggcttttgagacaggagtcttgctgatgctcccggacgaataaaccccttccttctttaactcagtgtctgaggggttttgtctgcagctcttatctgctacagaatgatttctgcttttttattgaaccaggccctgtggctggaatggcctttctcacgtaaaaaggttcttcttggttcccagtttccttcttgcctgccgctgcctgtgacctggtcatcacatgaggcattttcctgccactctctctctctctgatgtctgtcaattaaaacattacctgggggcaggtaatgtctttccccaggtaagggcaatttcataaggcccttagaaaggtgcatgctgggtttaatgctctgatgacatcgtcttgaaattcacaataatttttgaacaagggttgatttgcatatagatcctataaaggaagtggtggtcctgcctggagaatccacgtccctattgcattttcattacatcggaagcatatatatgtttatacttgaggataaaatgagaactgtgttgtactggagaatgatgtttgatggcaattaagagcctcttcttcaggaataggtgattatgtggtcgttcccacagatcttcgaaagggaaggacctaggaactgaagccagacccccacctctgcaagagttccttgctggagtcactcagcagacccccactctctggactttggggacatgagactgctgagcacctccaccagagggaaagtggaagtggccccaagaaagagggaaccacgaagcagtttcaggtatcatgtctcaaacagtaagaaatcagaaaaacatagggcttatcagctttgattgttccttctgttttgtcctcctggacaattgacttcgacaaatatttgctgcatgaaaataattaagatgcagtgcccgtcttcagtgagtttaaaaggaagatgctggacagtaagtagtgtcaagatgaaattaagagctgtaaaaatacaatactaaataggcaaagtacttgagagttgttagttggcataagaagtgtagagagaagtagaagttcagggaatgtgggtggtaatgtgtgtctggactagactgtgggcttcctaaggccagggactctgccatatatatgcatggtaggctctctgtcagtatttgttgggtggatggataggtgactaggacattccagctggaaggcaggttggagccatattgcaaatcttcattgctaaggaagaggtttgtgctttgttttgataaagcactgaggagccaccaagtttgtgggattttgttcctgtttttgagttatggtacagtgagattggacccatattttaaggaggagtcatgagaaaacagtggcatgtaaggattagagaggtattttgaaatcagtgtttaaggaggacttttgcagggatgtgaaggagggcttggcagagggcaggactgcaaggccaacagggtggtcactaagagctggtctttgctgccacacctctgtcacctcctcccttttcagtgcccctggtcacccaggttacagcaaacctctttcaactgtttcctctctcatgtcttcctgcttcttcatgttggttgatcttctgaagcactgagcacatactgctgcagaccttgcagaaatttcccatgactctgtcctctgcactcctcatcctgatcttctagatgctccactacttagcaccacccctgcccacctgccagaatggcccagcctctccctccacctgaacctgttttagtccgtgccatagcaatattgcacaagcatatttgagtgtaagtctttgtgtataaggttctaacttgaattgtcctccttttgtcctttcacactctaaatactgttctctttatttaaaggtcaaaactttcatgaagttatagctaacacctggcagcattgacatctcccttctcccttcttttttctttttcttttctttttttttttttttgagacagatcctcactctgtcaccaaggctggagtacagtggcatgatctgggctcactggaacctctgcctcctgggttcaagtgattctcatgcctcagcctcctgagtagctgggattataaaggcatgcaccatgacacccagctaatttttgtattttttttagtagagacaggatttcaccattttggctaggctggtctcaaactcctgatctgcccacttcagcctcccaaaacgctgggattgcaggtgtgagcctccattcctggccaacatctcccttctctgactttggtgtcttacgctatttcaggtgtttaatttctgtactgctttgtggtgtggataacttctgcacaatatatgccttaatctccatttatgctgtaatttagtggacagtaaatgttcagcttacctttggtatctctcccagccccttgcattgtgcaacacacataacatttcactcagtaaaacttacgaatgagtatgctcattcatatacaatatgaatgtattgtttatttatcagtatacaaaattggctacttttggagtaatagcttttttttttttttttttttgggagacagagtctcactgcaacctctgcctcgggttcaagcaattctcctgcctcagcctcctaagtagctagtagtagctttttaatacatattatcattactaataagggtactatcaaaggatttatgaaagtctgaatgaataagctaggacttattgttatacctttggatgtagcctatatttgcacgcaaatagatgaagtcatatattttagaggtttaatttaaagccccagatattacatattgtcctgtttatgtgcgcgagatttaaataatcaaaagaggttttaaaaaccagaattagtgctattctaaaattctccttttcattataccagaaatgcatacaggaaggctatgggtatattaatatgctactgatattttatctttcatagtgaaaagttaaattagtaaaatcaatttatttcaattttacatttatctcattgagataaagcaatggcaggatatctggtatttttaatatgcccttccaatataccttgaaaaatttttttttattttttagagatgggggtctcgctctgttgcccaggctggagtgcagtggtataatcataattcactacatccttgaactggcctcaagcagtcctcccacctcagcctcctgaatagctgggactacaggtgtgcgctaccatgcccagcttatttatttatttatttatttatttatttatttcagagttgaggtctcactatgtttcccaggctggtttcaagctcctgggctcaggtaatcctcctgcctcagctttccaaagtgctgggattacaggcgtgagccactgtgctgtgccagtctctaccttttaaatttatttagatactgatgtagtcttgaaagctgtagaatgcttttgtatagatatccttaattcaaatgagattgaattaaaggttctagcctgaattatatttacacaaataaaagactagatggatgagcaacagatggattttaaaacaaaatgtagcaaaactctccccagactcatgacagtcaggaggcacaatttcatgtttgtttcacactgtgagacatcaaatacattattaatgtaactaatgtggttgtttcttcagattctggctgaataaaccagacatttgcttttctaaagtaggtatttatttcttgtgaatttgaggattctaaacattagcatcttctccttaacatgtgctcttctctctaaccagtgtggaaagaagaaaccctctggtggccttggcccgggaatatggcggtttcaagtgcaatgctgtactgaaatggtaccagaagaagacagaaggttacatggtaagggacaatgtcagccagcttccaccagccctgggcagtagtaggcctgtgccagtacatgttccatgtgtgcctgtgcttggtggaccaatatgcatgtaattatcatctttctgttctcctagacagagaggcatatgcaacgggaagccagtttgcactccacccaccaaacatatgggtgcatgcagagctgcatctccctagggaagggggaccttttcctttgctcaaagtgttaccgatcatgggttcttaggctcttgatgcaatagaaattctcaccaggccaaaagagttttcctagcaaggctttattggagcatatgcccaggcacaagggaggaagcacaggagagggaggattctctggctgactccctgaaatgagctgatagggatttcttttattaggcaatgtgcggaaattgatgtcaaggtagggaatgcgggctgggcagggtagagaacgtgagggggaggggacatgggtcagcttatctgctggcaatggttgtcttgagtaatgggccatctggtgctctggttagtggcagcaaggctgtatgaatcagttgtttagcattccttcctgaggtgggatacttgcaaccttggttggatattttggatctcctaaggccagttcctgtaatcctttaagtaaaaggcaaggtttaacattatgagagcaccgaagaacaatatagaatggctgttttctttgcgtgactgttagtgggtatggcgtcagtgaggtagtggtgtgggttttgtgatcagtgggaatgcatgaaagaatgctgtagtggggcctccacccaaggagacagcttttgctaaattacactcccaaagaagagtgctttgcctaattcatataaaggccctacataaatgagcctccaaaacttctccaaatattttctttctgttgctttcagagttgtttgcatttagtttaaagagtttttgtttactacgacagtatctgttttctgttcagaaaaggaattaatacctggtataagtttaagttttttgtgcgtgtgaaacactatacacaaagataaaaatgcacaaaatataaactatagtgttttttgttgttgttgttgtttaagagacggagtctcattctgttgcccaggctggagtgcagtggcgtgatctcggctcactgcaacctctgcctcccgggttcaagcaattctcctgcctcgacctccggagtagctgggattacagtcgtgagccaccacacctggttaatttttgtattgttactagagatggggtttcaccgtgttggccaggctggtctcaaactcctgtcctcaggtgatccacctacctcagcctcccaaagtcctgggattacaggcatgagccaccactcctggcctcaaatgatagtctcttgaactaggaggaagtgaaaagtcacacagtcaccactcacatccagaagaagagcatcgccagctcccacagacctttcctacaactttcccatcataacccctcactactccctaagataaccattgtcctcaattattctccttatggattttcacaaaagtatgcagccctgaatattatgttagtattgcttgcatttgaattttattataaatggaattttaaaaactgtgtaattttgcatgttttttttttttttttggttttagggagcggaaagtttaataggcaagaaggatgggagaaggcagaaaatggaggctcccctgtacagagacagagggaggggagcttttttttacacagtattgaatcagtgagatttattcatgttgtcacctatactgtaatttgttcattttcttcaccatttagtaacccattgtaggattatagcattatttagttacccattctattattgatagatcgttgagtcaagtccagtttggggctaaggtgaatagcgctgttatgttcatgtcgatgtctcttgaaacacatatgtgcttgttcctgttggttacatccttcagaatggaattcctgggccttagggtatgcatacattctaggatagtaccaaacagatgcctgaaatatttgtataatttatgtcttttcagcaatttatgagaggtcaatttctgtgcattttcatcaacacttggtagcatcagtctttttactggaggtcatgtgggtaatgtgtagtagtgtctcattgtggttttgatttgcatttttcttttggcagtggagattgagcaccttttcatatgcaaattggccatgtggatagtcccttttgggatgcacctgctcaggttttttgcccactttgtttgtttggtggtggggagcgggggtattggctctgtaaacagcatatgaacttttgtccattttaagaatcagatgtcattctcttccttattgcttttaagaattctttatatattctccatgtaagtcctttgtcaaatacatatatggcaaataccttcttccagtgtgccttaaattttcttcttttggctctgcctctgcctctgccgctgccgctgccgctgccgctgccgctgcctctctttccacagtctccctctgatgccgagccaaagctggaccctctgcctctctttccacagtctccctctgatgccgagccaaagctggactgtactgctgccatctcagctcactgcaacctccctgccagattctcctgcctcagcctgccgagtgcctgcgattgcaggcgcgcgccgccacgcctgactggttttcgtatttttttggtggagacggggtttcgctgtgttggccgggctggtctccagctcctaaccgcgagtgatccgccagcctcggcctcccgaggtgccgggatggcagacggagtcgcgttcactcagtgctcaatggtgcccaggctggagtgcagtggcgtgatctcggctcgctacaacctccacctcccagctgcctgccttggccccccaaagtgccgagattgcagcctctgcccggccgccaccccgtctgggaagtgaggagcatctctgcctggccgcccatcgtctgggatgtgaggagcctctctgcctggctgcccagtctggaaagtgaggagcgtctctgcccggccgccatcccatctaggaagtgaggagcgtctctgccaggccgcccatggtctgagatgtggggagcgcctctgccctgccgccccatctgggatgtgaggagtgtctctgcccggccgccccgtctgagaagtgaggagaccctctgcctggcaaccgccccgtctgagaagtgaggagcccctccgcccggcagccactctgtctgggaagtgaggagcgtctccgcccggcagccaccccgtccgggagggaggtgggggtcagccccctgcccggccagccgccccatcgggaagggaggcggggggggtcagcccgctgcccggccagccgccccatccgggagggaggtggggaggtcagccccccgcccggccagccgccccgtccgggagggaggtgggggggtcagccccccgcccggccagccgccccgtctgggaggtgaggggcgcctctgcccggccgcccctactgggaagtgaggagcccctctgcccggccagccgccctgtccgggagggaggtgggggggtcagccccccgcccacccagccgccccgtccgggaggtgaggggcgcctctgcccggccgcccctactgggaagtgaggagcccctctgcccggccaccaccccgtctgggaggtgtactcaacagctcattgagaacgggtcatgatgacaatggcagttttgtggaatagaaaggggggaaaggtggggaaaagattgagaaatcggatggttgccgtgtctgtgtagaaagaggtagacgtgggagacttttcattttgttctgtactaagaaaaattcttctgccttgggatcctgttgatctgtgaccttacccccaaccctgtgctctctgaaacatgtgctgtgtccactcagggttgaatggattaagggcggtgcaagatgtgctttgttaaacagatgcttgaaggcagcacgctccttaagagtcatcaccactccctaatctcaagcacccagggacacaaacactgcggaaggctgcagggtcctctgcctaggaaaaccagagacctttgttcacttgtttatctgctgaccttccctccactattgtcctgtgaccctgccaaatccccctctgcgagaaacacccaagaatgatcaattaaaaaaaaaaaaaatttcttcttttgatgaacaaagttcttaattttaattaagtctaatttatcagtctttcctctaatggttagtgcttgttgtattctgtataagaaattgtttattcatggccgggtgtggtggctcacgcctgtaatcccagcactttgggaggccgaggcgggcggataacaaggtcaggagattgagaccatcctggctaacacagtgaaatcccgttctctactaaaaatacaaaaaaaaaaaaaaaaaattagctgggcgtagtggcaggcacctgtagtcccggctgctcgggaggctgaggcaggagaatggcatgaacccaggaggtggaggttgcagtgagctgagatcatgccactgcactccagcctgggcgacagagtgagactccatctcaaaaaaaaaaatacaaaaaaaccccaccaaatagcacatttttaaagggtatgttttgtggtgtgtgatttatgtaccaataagttatttatttaaaaataataaatatagtttgaagggcttaagtagagggatgaggaagatgttgggagggagtacatcgggtggagtaggagctgccatttaaattataaatattatcaaactataacttaaaaaatttacatgtattactttgtatattaaaaaataattgaaggccaggcacagtggctcatgcctgcaatcccagcactttgggagcccgaggtgggtggatcccctcaggtcaggagttcgagactagcctggccaacatggtgaaaacccgtctctactaaaaatataaaaattagccaggcgtggtgacgcacaactgtaatcccagctactcgggaggctgaggcactagaattgctcaaactcaggaggcagtggtggcagtgagccagaatcacgccactgcactgtagcctgggtgacagaacgagactccatctcaaataataataataataataattattattattattgaagcaaaacaataaagtagaagagatagatgcaagttattagtaatctagtttttacttgggaggcaggattcacaagtatttattttgttattatcattcataatccaagcatattctttgtatcaaaggttatattatgacctacgatttggaggtggaaaatctgaaggaaaggccatgaagaagtattgtggttaataattaaaccagatgctttctgagaaaagatttaaaagggagaaataaaacccctgaggagggtgctctcctgggatgacagcgtcaggaatggacctgaggggcctcttgagctgggcacaatccacagtgctgctgtcccacttcacagccctgtgacaattcacaagtcagttatttcttcctaaactgttactttttgaattaaaatacacacataaaagagtgataaaaacatttttcagaaaaatggcatttttccaagtggcttacctaaaaatgcccttagcctgaattacatatactgtgttataactcagaattttctcattttgacatggtcccttcttattttataaagataatacaagtgatcattttatgtcatcaaagcttttgcaatttgaaatagtaatgatgtgagtgatactgttaaactagatttaagtcttgagtcagatgaatggcaaatccagcccaccacatgtttttgtaaataagtttcgtaagcacacagctccacacattcatttacatattctctagaactgttttttgctgcaactgcagagctgagtagttgcaacagaaatttttcagttagatgacctaccaaactgaaattatttacaatttgaccctttatagaaaaaatttacttagatgaagatatatattaggttggtgtaaagtaattgcgttttttcccattaactgcaattacttttgcaccaacctaatacacatgttccttagatgaagatacatgcaagtatctcctgtagttcaaatcctatttggggcctggcagggtggctcacaccagtaatcccagcactttgggaggccaaggcagacagatcccttgagcccaggagttcgagaccaggctgggcataccaaaaaagttagctgattgtggtggcacatacctgtagtcccagctacttggaaggctgaggcaggaggatagcttgagcccaggaggcagaggttgcagtgagccaagatcgcgctactgcactccatcctggatgacagagtgttatccaaactgaatcttgttttaaatctggaaagaacacccacgttgcaggcaaattgtttttctgtctctgagttctcacagacaagcactaaaatctgcttagccaacagcaagcaacccctgaaatatcaccccacctggggctctgtttcttgtcttttttgagagaggtctcttgaaggctacatgcacaattcaaaaaacataaatcctttgacttatttattgccatcagagtggtcctttccctgacttcgttgtgaagatagagccccaatagtagatgcgcggcactgtgggcttccactctattgaggccttttctacctgctctccctgcttctgtgccgtttctgacacagtggcttctgaagtggtacaggcattgtgctacaacctaacagtggagtttgtttgaaaatgaagacgaagggctctcccgtgttgtgggagacacagtcctctcctgatggccatgtttctggttggttttctgtcatgagccagtgtgctctggggcaccctgctcccactgttactggtgtgtgcactcccagaggtatgaaactttgaggaataaaaatggctttctgaacaaaaatatcaaacagtgtagagacctgtcagattgttcgcacagcagatggggagggacgcgttctcccactttaatgtacacaaacaccagagaagtagccccaacaagtctaagctgggcccatcagcctcttcctcgggaattttggaaataaaactgagtaagatcaccttaaaatacaaagcccagatgctgttggcaggcatgtttttgcctctgtgcagaaaatagttaacccaggaggcctgggatggctctccttagcaaggctgcttgcaaggctggcccttggctggagtctgagaactaggattacaggagggttcacaccattcccagaactgatgagaggggctcacggtgctgaaactgtttgtgcaaacacgtggtttgtgctgaacagcggcttatctgtgaggagtctggaatgtggtatatgctgggcagaaggggcccatgtgaccagcccctgataaaaacgctggatgcagagtccctaatgagcttctctcaattaattaattaattccttgggggaattaaacgtgcctgtgactgctggagaggactcttggaagctcatgcctctggacttaatgccctgcgccttttccctttgcggatatggctttgtgtcctttcactgtaataaatttgtgcatagctgtggccatgacttcatgctgcgtcctgtaggtcctccctctgatcattgaacatgggctttttcttgagccttaaaaaggagtaaggcactgacacaggctgcagtatgaatgttcgctgaagacgtgttgccaggtgaaacagctgggtgcaaaggctacatcttgttcgagtccatttataagaaaaatccagaataggcaaatccacagaaacagaaagcagatgagtggttgccaggggctgaggagagaggggaatagagagtggggtggctgcttagtgggtacagttttctattgtgtgatgaaaatgttctggactagtgatggtcgcacaacattgggaatgtactaaaagccactgaactatacactttaaactggtttaaatatacaaatttggttccattggtcttttataccagtacaatgccgttttggtaactagtataatttgaagtccagtaatatgatgcctccagatttgttctttttggttaggatcgctttggctattcaggctcttttttggttccatatgaattttgggattattttttctaaatctgtgaaaaatgatggtatttggatgggaatttcattcagcagattgtagattgctttgggcagtatgatcattttcacaatgttgattctatgagcatgggatgtgtttccatttgtttgtgtcatctataatttcagcagtgttttgtggttcttgtacagatctttcacctccttggttaaatatattcctaggtttttgtttttgtttttgttttgcagctgctgtaaaagggattgagttcttgattgattctcagcttcgtcgttgttggtgtatagcagtggtacttctttgtgtacattgattttgtaacctgagacttgactgtatttgtttatgaaatctaagagtctcatggaagagtctttaggattttcaaggtatatgatcatatcatctgcaaatagagagagtatgactcctcttttccaatccggatacgctttatttatttctcttgcctaattgctctggctaggagttccagaactatgttgaataggattggtgaaagtgggcatccttgtcttgttcgtgttctcatggggaatgtgttcaacttttccccattcagtattacgctggttgtgggtttgtcgtatatccacatatatattattttgaggcaagttcttttatgcctagttgttaagagcttttatcacaaagagatgctgaactttgtcgaatgttatttccgcatctattgagatgatcatatggtttttgtttttaattctgtttatgcgatgtcacatttattgacttgtgtatctatcaccttatacaaaaaatcaactcaagatgtatcaaagacttaaatataagacttgaaaccataaaaattttagaagacaatttggaaaactcttctagacttcaacctaggcgaagaatccatgactaagaccccaaaagcaaatgcaacaaaaacaaaaataagtaaatgggacctaattaaactaaaaagctctttacagcaaaagaaataataatcagagtaaacagacaacccacagaatgggagaaaatatttgcaaactacagtccaacaaaggactagtatccagaatctacaaggaactcaaacaaatcagcaagtaaaaaacaagtaatcctatcagaaagtgggcaaaggacatgaatagacatttctcaaaggaagatatacaaatggccaagaaacatgtgaaaaaaatactcaacatcgctaatcattagggaaatgcaaaataaaaccacaatgagagaccaccttactcctgcaagaatggccattattaaaaagtcaagaaacaataaatgttggcgtggatgtggggaaaagggaacgcttatacactactggtggtaatgtaaattaatacaacctctttggaaaatagtatggatattccttaaagaactagaaatagatctaccatttaattcaacaatcccactactgggtatctacccaaaggaaaagaagttattatatggaaaagacacacatgcatgtttatagcagcacattcacagttgcaaagatgtgtaaccaacctaagtgcccattgactaatgagtggataaagaaaatgtgactatatatatatatacatatacacacacacacacacatacatatatacatacacacacacacacaccatggaatactacttaaccataaaaaggaatgaaataatgtcttgtgcaacaacttggatggagctggaggccattattctaaatgaagtaacacaggagtggaaaatcaaaaatcgtatgttctcactcatgagtgggagctaagctgtgggtatgcaaaggcatacagagtggtatggtagactttagagactcataagggaaaggtagggagggggattaattttttttaataaagtaaaatatatgtattttaccctattttttaaaagtgtcgtggctgggcacagtggctcactcctgtaatctcagcacattaggaggccaaggtgggaggattacttaaggccaggagtttgaaaccagcctaggcaacatcatgagaccctgtgtctaccaaaaaaaaaataataataacaaccaggtgtggtggcatgaacctctgtagtaccagctacttaagaggctaaagatggagaatgacttgagcccaagagttcaaggctgcagtgaactatgatcgtgctaccctagtccagtctgagcaacaaagagagacaccatctctggggataaaaaatggccataatgatgaatatcacttatcgtgcctttttatgcttgtgctaaatagttgtgaaatactgctaaatttttgtaaaataagttcctagaagtgaatttgctttgcaaaaggttgtgttatactttccattttaatatatattctcaaattgctctcctgtaaggctatttagtttacacttctctacacaatgtgcaagattatacacattcccaatactggatacatgtttgatcttgttcagcctaagaggagaaaatggcattccttttaattcttcattgtagatgaaagtgaagcactttttatcagtttgttagtcatttacatctttcttctgtgaattactagtacagttgctttgcttgcttttctgtttgcatgttcttcttttttcctcaaaatttgcaacagttttttgttttgtgttgttttttatttctaagaaagctctgtgttcccataatcaagtctgcagagatcctgataagcaaagcagtcagcctggcctgagagctctgcttcctgctccccagagtcaagtgttttcaagtcaccttgctgattttttggcatttacctctacattgctaaatagcatgcttatcactgctgtttctagtttttcattttagatgttatattttgatctcctactgtgaaagatgaggatttcttttctgcccccagcctccgtgcttcctgtctttgcattctctcattgtggttttgtgtacctggagttcacattaagatgctgtgagtgtcattcatagattagccatgtagtagtatacactgctgctgctttttcttttacacaaccttttattcaccctccacctaaaattatttttgtctgtttacttagttttcttttgcttttttttgagacggagtctcactctgtcgccaggctggagtgctatggcacgatctcagttcactgcatcctcctactcctggattcaagtgattctcctgcctcagcctcccaagtagctgggattacaggcacatgccaccacatccagctaatttttgtatttttagtagacggagtttcaccatgttggccaggatggtctcgaacttctgacgtcaggtaatccacccgcctcggcctcccaaagtgctggaattacaggcatgagccaccacacccagcctgtttacttagttttctatgtaaatgtcactaattcaaccccaactctttgtgagatatccccacacatcacaggggtcagggatcacagcagtgtcatcttgagatctctctggagcctctgacctcctccatcatggctgccctctgtgcctggtgcacagattccctgttagttctttgcctctctcttttttgatcttctgtgtcctacatcctattctttttctttttctttttttttcctccagtatctccctgagaatgggttcatagaaggtaaaattttatggccttgcatctttgttttaccctaatgcttgatggtttccttgggtataacattttaggttagcaactatttccctttataattttgtgggaattgttccattgtcttctatttgccagtgttgcagcaagaagaaaataattccagtcctttgtgacttttttctctccaaaagctcataggaggttcaggctgttgccaggattctaaactttcagtgtggtttgccttgctgtatagcttaaggtctttttttttctttctttctttctttctttttttttttttttttgtcatgctagtcactcactgcaccctttcaatacagtaattcgtgtctttattttctggaattatttcattggtaatttcttctactctgttttctttttctggaactccctttaccctggtcccctaattatcatatttttttctcctgttttctatctctttgccttataattttgttttctgggattaaacttgaggcttccctaagtttatcttccaaattctattaaatgcttcatttctgctatcttttttttgtttttgcatcacttcaattttcttactttaattgtggcaaaatacgtataacataaaatttaccatctgaaccatttttaagtgtacagttcagtattgttgagtatattcacattgttgtgtaaccaatctccagaactttttcattttgcaaaactgaaactcttacccattaaatactgacctgccattccccttgtcccccagccaccattctactttgtatcactatgaatttgactactctaggtacctcatataagtgaaatcatatagtatttgtcctttttgtctggcttatttcacttagcataatgacctcaaggttcatccacattatggcatgtcagaatttcatttctttttaaggctgaataaaattccgtcagatatgtttgctatcatatatttaacttctaggatttttttgttccctaaattttttatagcatcctgttcttgtttcctagatgtaatgtcatatatgaatttcgctgaagattgtaggttgattctatcaccaaatctccctacctgggttgtttcctacagtccctttgttccactggtatctttagttctctatctttatgcttgaggtttgactgctcatgtttaggtggaggctctgcaaagctgaccgctgcctgggcctgtgtatgtggcctgcaactatggtcttcatagtagagagctgttcccgtggcatgtccatgacaaactcctgatgtcagtgtctttaggtccttcctcttgggctcatccattccccagagaagggccttccagtctcctgcttgagggcttagacttggcagccaggattatgggatcagtcagagaagaggcctgggggtggagaatgactatctcagccctcaccttgtaaattcgtttaattcccttgttttcaatgtatcacttgtgcctcaactgctcaatatccacccggtccagaggcttcattttatgctctggtgtgcagggaagagagagtgtctggagctttggctgctctgtgaacacatctctaacccagtccttctgtttttaaccaccttcatcccccgacctgaagcacctcttgccacaaatttcctgagcctttgggggattttgtaccataatcaggtctttgcccttccccactgctggcttgggatttagtttgcttaggtctgttttgttagttatttcttgtccatcaacttttcagctgccaagttttattttctttgctgttttctttttccttgtcagttaatgcttttgggggaaaaaaagaaatgcctttctgtggtttcgtggggcttcacaatggaatgagactgtgagtgcatgcatttcattgctgtctgcctggaagcctcagagcactttattcgtttctcctgaaggatattaaccatatctgtcacagaggtcccagatatcctttgtgtgtgtgtgtgtgtgtgtgtgtatatatatatatgcacacacacacatacacacacacacacacattatataaatacacatactcctttgttctggatggccatttatttcagcatcacttatttcatcatctctcttgaactacctgataggcctaggtatgaatgggaactgagtggtgtctggacttgttgttcccttctgtggctctgtgggtctggtcctctgccacaggttgctgctgagcagagaaatgagagcatgatctgaatgctgcacaacatcctgggtcccagccagggccctgtgagtgtcagccagtgctgttatgtgcattgtcgtcatgatttttatgccctggcatttttcattatttcattatacttgttggtgtgccagataaattactacaaataattttatttcttctttccaatatttatatctcttgtacttttttgggtttattgcattcatgacagtctgaaacaactaatacttattaatgctggacattcttgttttattttccattaatagcaatatcttactttaagatttttgtattgttttctgatgaatagtttatcaattaagggaagcttacatctgttttgaatttactgagtttttttaaatcccgaaatagataagaattatagcaaattcctttttggcagttaatgagctattcatatggtttctttttaaacttatttatgtaattaataacataaatagattttctagtaggaaaaaattcttacatatctgggggcaaaattccaatttggttatggtgtattactgttgtgggaaatctctacttgattatggttaatatttaatatgaagcatactattttttatactcttattgatgaagagacatttggcttgtggttgcttgctttaagtataaataaagttttgtgttaataaggcctgatttttttagttatgatgttagtgagctctaaaaccctgtattatctttttatgtagtcaaaaatgcaataagggccaagtgcagtagctcacacctataatctcagggctttaggaggccaaggtgggagaatcgcttgaggccaggagtttgagaccaatcaggtcaacatagcaagacctcctcttacaaaaacgttttagaaaaatagctgggcatagtggcacatgcctgtagtctcaggtacttgtgaggctgaggtgggaggattgcttgagcccaggagttcaaggttgcagtgagctgtgatcatgccactgcactccagtgtgggcaacagagtgagtccctgacttttttttaaaaaaaaaaaaaagaaaaagtaatatttatttattttactgccttctctagtagtgttggtgacagaattaattctcagccaaagttttttttttttttttttttttttgagacggagtctcgctctgtcacccaggctggagcgcagtggcacgatctcccctcactgcaagctccgcctcctgggttcacgccattctcctgcctcagcctcccgagtagcagggactacaggcgcccgccaccatgcccggctaattttttgtatttttagtagagacggggtttcaccatgttagccaggatggtcttgatctcctgaccttgtgatccgcctgcctcggcctcccaaagtgctgggattacaggcgtgagccaccgcacccagccacagatgttttatactctgggtataagactctgactctcaaatctgacaaacgaaaacttgaagctttaaaaaaaaaagaaatggttggaagttgggaaacttctcatttaaaagttccagacaatttttgtgttctctaacagtgaagactgaagttttccctgggactgatgcccttgttttggtgaaagtcttctgaaaggacctgttagttgtgcagaagtaaggctaggcctcctcctgttctcggggctcagggtgtgagtggtctgaggcccgccatcgaccccggtgcctcagtggcagatcgagtgtctctcatcccttgtggccacttgatctgctgaattctgagtcggatgtgttgaagtctcttcctctgaactgtggtttgtgtaaaaagctttgatttctaagagattatgtcgaaccatacataaaggtttctagccctatcttcttggtggtggcttttacctttaattttagttagtccttttaatcttgaagtatacattttgcaataccaatattactgtttccatctatgttttgaggttagaaatcagagttggaggcagggtctgggcccaggtgctcttgccagggctgctttctagggtagaatggaggaagagccttgggcaagggccaagaccactggccactgtcgccaggggagcactcaaaagtcagggctgtgcctgggagcaagagggactccaaagacccagagcagatctggagcactgtgagttggaggagttggggtcggacggcagcctacaagggtgagggtggtgagaaagcagggtgaacagagaaggacagatgtggcccgctcagggatccacaccagtgtatggaaactgaggcccagagaccaccagccagtaaatagctggacccagggaggccaactccacagtacgcacccttaactaccatgccgggtagcatccttactgtcccagaagcatgcttgcttcctctttacacaaaccatcccactctacacctcttcccctgagcgcacaggacaggacaggacagctcagtcaacactgtcaaacccatgactcatgggaggagcatccctccaggcatgagtgagctcagcatggcacaggtgtgccaggatgacccctactgacatttcttccctgcttgtgtactctttgggatgctcccacccctatctcctgccaccctcagagccccataactgtgtccccctggctgaggcagccctgtgcccacggccctggaactcactgggctcagatagggagcctgggaaccgctgaaggccatctccaccgcctctgtggccaccgctgcctttcacacctgccaggcagtcctttgcagaaggaatgacttaacaaagaaatagaaaccaaagcaacttggctgttattcaatggggaggagccggcagcaagaggaagtgggtccagagagagaaaggtggtagggtgctggttgaactggggtgacactcatagagggaagtaggcactcccagccccagtgacctttccctcctccctctcctgtgctcaaccccagcctgaagcataattggtttatagaggtctacaatgcttgaccacactgacatgacagtgagttgccagatgacactgcccagaagtatgtggctgggtgtcctaagcatgcttggccactggttccagaaaataatggggctgggcattgcctgtgcacagggtgcttgtggggaagggcggcttcaacccattttacatatagagaagctgaggctcagagtctaagggagatgccccaggtcacacagctaattcgtggcagcctgagctatatgaagattctcagactcttcaaaaagtatttctcctctttaaatttctattcttcatgtaaaaacataattatgtagaagggaatattttgcatgaaaaacactataatgaagatttttattctagagtatgtggtgcccaggagcttctgatcctccctctcagtgaatctctcttttttctcttctccatccttattttctgagctttaggatggggagagaagtcttggacataacagaacatttcaagcgacatgggagtgggaaggaacatatggcatgaactgcctttaattggcttcagcagctagttaggggaaataattggctgaaacagagaataacaggataggctgcagaggggagagggagccatgaaataaacttacctgaagttgaccaggtcccaacgatgtgctggcgagaaggcccagaactcaagctggggatgggcgggtaaggaccatacaggctcgaggggatggcaggtgccccaggccatacgtgagtctgcacgtctcttccttcctgtgctctgcctagatgcactagaatttgcagatgaattcctttgagatgctcccatagactgaggccgtgtgtgtcgtctgcactctccatcccattatgttctggatcaagtagaatctgaccaagttaaggaatagacagtacaaggggagcagaaaggagagaaaggaagggaaattctttgcaatcctctcgaacaccaggaatattttcatcacgtcacgtcatttgtaggcaatcaccaattgattgggatatggaacaactggaactatcattcatagcagacttgagtgtaaaataatccaacttaaaaaaatgggcagggcgtggtggctcatgcctgtaatcccagccctttgggaggctgaagcgggaggatcacttgagtccaggaggttgagaccagcctggccaagataggaagaccctgtctctacatataatttacaaggcaaattagccaggtgtggtggtggacacctgtggtcccagctatgtgggaggctgaggtgggaggctcacttgagcccaggaggccgaggctgcagtgaaccctcatcacgccactgagctccagcctaggtaatagagcaagactgtctcaaaaaattaaaaaaaaaaaaaaaaaaaaaaaactgcttggtgagttgtaatacagtcaaatatctacttctatgttctggcttttctacttctgaaaaattacccaagagaaaggaaaacatatttgtctgtttttaaaagctttactcatcgtagccccaagctggtaacaatgcaaatggtcaccaacagaagaagggagaaatgaattgtggttttcacaccacagggtggccctcagcaataaaaaggagctaggccacaggaaacgtcaatgagccttgcaactgagcggaagaagccagatccaaacagacacatgctgtgagaattccattcgagtcaagttgaacaacaggccagagtggcgttacccttgggagtcactgactgggaggggcacgaaggagtcttggagaggctggaaatgttctggatctggttctgggtggtggtcccacaggtgtttacatccattaacaacaggctgaggctgggtgcagcagctgacacctgtaattcagcactttgggagactgaggcaggaggattgcttgagtccaggagtttgagaccagcctgggcagcatagcaagaccttctgtgtactaaaaatcaaaaaacttagtgaggcatggtggtgcatgcctgtagtcccagctacagggaggctgaggcaggaggattgcttgagcctgggaggctgaggccacagtgagctatgatcacaccactgcactgcaggttgagtgacagagcaagaccctgtctcaaaacaaaacaaaactcaaacagaaaaccaggatctgtacattttactctacctagacgatatctccgtaaaatactgctaaaagaaaatatctcccagagcccaaggagacacaggcacagctaagagttccagcagtttagcaccttagcatcaccttgagccttggaggtgagtcacagttaagcagcttcactagtgagtccagcccataaaggagggccctctgctccacaccctgtctggaggtgccccagtaaggtcatacccaaaggctgacatgtttttagactaatcaacacagtacagtagggaggcacttcgaggcacagtgccaggccactgagagttctgacttcggcacccttcagtcaccacaatccattcccagtggttagctctggtcttcaggagactagaagcagccctcgggaatgttcctgctcagagctctagtgttcaaagtcacagacccttctcggaggctctctgttctctgccctatagactgagggagtctgccacctcacgctcattaggatgcctatgattaaaaaaaaaatccagaaaataacaacttttggctagaatgtgagtaaactggaaccctgtgaaaacagcatggctgttcctcaaaaacctcatcatagaattactatatggtccagcaattccacttctgggtatatcccccaaataaccaaaagcaggaactcaaagagacatgtgaacacccaggtttgtagcagcatcattcacaaaagccaagaggtgaaagcaacacgtgtccatcaatggatgagtggtcaacaaaatgtgggccagacatacattcagccctaaaaaggaaggaaattctggcacatgccacaacatggatggtccttgagaacattaagtgaaataaaagtcataaaagaacaagcactgtaggctgggtgcggtggctcacacctgtaatcccagcactttgggaggccaaggtgggaaaatcacctgaggtcaggagttcaagaccagcctggccaacatggtgaaactccgtctctattaaaaatataaaaagtagccgggcgtggtgatgagtgcctgtagtcccagctactcaggaggctgaggcaggagaatcgcttgaacctgggaggcagaggttgcagtgagctgagatcgcaccactgcactccagcctgggcaacaaagtgagactgtctcaaaaaaaaaaaaaaaaagaaagaaaaagcactgtatgatttcacttgtctgagatacctagagtggccagaatcaacaaaagaaagtagaacggtggttaggggctggtaggagggggaatgaagacttgtcatttaataggtatagagttctggttttacaagatgaaaagagttttgtggatggatggtagtgataattgtataacagcatgaatgttcttaatacctctgaactgtatacctaaaactggttaatatggtacattttatattatgtgtgttttaccacaattaatttttttttttaaatggggtctaactctgtcatccaggccagagtgtagtggtgtgatctcagttcaccacaacctcctcgccacccccaccccttctcaccaccctcgggctcaaaccatcctcccacctcagcctcctgagtagctgtgaccacaggctcatgccaccatgttcggctaattttttgtacttttggtagagacagggtttcgccctcttgcccaggttcatctcaaactcctgagctcaagtgaatctgcccaccttggcatcccaaaatgctgggatttacaggcatgaaccactgcacctgcctgcaattaaaatttttaaaaatgtggccgggcacggtggctcatgcctgtaattctagcactttgggaggccaaggtgggaggatcacctgaggtcaggagttcgagacctgcctggccaacatggtgaaacccagtctctactaaaagaacaaaaattagccgggtgtggtagtaggtgcctgtaatcccagctatttgggagactgaggcaagagaatcgtttgaacccaggaggcaaaggttgcagtgagccaagatcgtgccattgcactccagcctgggcaacatgagtgagacttcatctcaaaaaaaaaaaaattttttttaaatgtaagtatgatggtctctatgaaccagactgagaatctaccactgccaggtttattctgttccctgtccccccacagggccttaccctaggcacttccttcagggtgtttaggacaggctggtctctgcttgacaggtgctatgatttgaatgtggtttgtgccaaccaaaactcatgttgaaatttacttgccaacatgatggtgtttggaggcagggtctttaagaggtgactgggttatcaggatggatgaatgacttcctctgggtgagttatcaagagaatggattagctctcctgagagtaggttgttataaagcaggtcagcctattttgttctctctctctggcacacgcttgcttgcccttctgcttctctgccatgttaggacacaggtcaaaggccctcaccagaagctgaccagatgagctgcccaatcttggacttcccagcctctagaactgtgaaccaaagtaaatctcttttctttgtaaattacccagcctcagggtgcattcctaaggtatatcagataactctgggtgacaggacttaggcagaacttcattatcagcctctcaagcctgagtgaaatgttttcattttagacattctaatagttgtgtagtggtgtctcattaatggttttaatttgcatttccttaaagagtgatgatgttgaacatttattcagttggttatttatgcctgtgtctcttctttttttgcattgtctgtttcaacgtgttgcccatttataaacttagatggttttctcattatttagttttgagagtaatttacatattttggatgagagtacttttcttttttttttttttttgttggtatttaacaagacttgacagatgcaagcactttatcagaaatctgattttcaaatattttctcttagcctgggactatcttttcattttttcaacagtgtctttcaaaagcagtccttaaatttttttgaatgtgccaaacacattcatatttattttatttttttaaaagtaaataatgaacagcagtttatcggtttgttaaacaaaaaaaatgacaggctgagttaagtctccatcagccaaagtttattgagtccaagcttgaggaagtgcccaggaaatacacaaggcacagaaagagtctatggcatggattctctgaagaagttttaaagagatttagtatttatacatatccttaaaaaggggaaggcatggccaggcacggtggctcaagcctgtaatcccagcattttgggaggccgaggcaggcagatcacctgaggtctggagttggagaccagcctgaccaacatgaagaaaccccatctccactaaaaatacaaaattagacgggcgtcgtggtgcatacctataatcccagctactcgggaggctgaggcaggagaattgcttgaacccgggaggcggaagttgcggtaaggcaagatcacgccattgcactccagcctggccaacaagagcgaaactctatctcaaaaaaaaaaaagggggggtggggaaggcatgtaggatgaggggcaggtaggtagtgagacagggaatagttatattcttgtgagactttagttagtgcccagtagatctgcattttacgtaagataaggtgaacttctgaaggaaaaaagggagtaaaggaagaattaattgtgcaggtgtctccgggtaggtggaagaatgattaatctcatctttgctttgttctgcacctggaaagataaacttggaatcaacattatctgtgtagaaaggaacaatgttggttttaagagctatatttagattgcagacctaaagttacaatcaacatgccctcattttatgggcggatatacatcttgaaagtttttgaggcagcaaaatatttaagtgtgactgatttgtggggcaaacatctggagctgcctgaggccttttgcatcctgtggaggtctggctaatgcttcatgctttcacacaaggttgtgaagtagcagctttgcacttggcaaaagcatggcagtgttgtgtggcacaagctccaggcttaactttctctttggcataaggagtttggggatcctgagattctttttattttcctttttaagttttacttttttaaaacctaagcttaacattacgtatttaaacaactgtcaaaacttactaagttgccagccagcattcatgcacaactagaaaacatgcttaatttatattaagccacaaatagattaccattaatatctttcagtactaaatactggggaaaaaagcaattatttctgtggaagattcatcctgacagtgttatcttatcagcaggctgacaccacttgcatcacatctcaagcaaaattgaaaatcagatacattggtagtgtacaatcttgtacacactaccaaagaatcatagctggatgggtgcagtggcttccacctgtattccaagcactttgggaggctgaggcaggaaccttccatgacagttaaactctgcctgttgaaaaaaagaaaccggggatggtggcaaagtcacacctgtaatcccaacactgtgagaggccgatgcaggaggactgattgagtccacgagtttgagaccagcctgggcaacatggagaaaccgtgcctctacaaaaaatacaaaaattagctaggcctggtagtgcatgcctatagtcccagctactcgggaggcataggtgggtgggaagattgcttgagcctgggaggttgaggctgcagtaagccaagatcgagccacagcctgggtgacaaagtgagaccctgtctcaaataaataaataaataagtcacagcttactttggattatgtttaattaagaaaagcaaagtacatacagagatttataactttaaagacaaaaaaagtcttactatgtgatccaaagaataaactcataagtccatgacaaatagaagttctaaacaattgtttacaaacacttcaggtataattacagtaaaagtcaagttcatctgaaatcaccaaaaaagtttctggttgggcacggtggctcaccacctgtaatcccagcatttagggattttcttacaataaaaggcatgcaggttgattattatcaaactgttcctattttaaatgacatgattgcccctatataaaattttaaggaatctaaaaacaaaaaacagcttccgaaactagtgagtttagaagcgcacagcatgcaacataaatatatgaaaaccgattgtatttctatatagtaataaaaaacaagtagacactaaaattaaaactgctatgttgtttataatcactcgaaaaattaaatacttagctataaatctcacaaaacatggacagaactcataagctgaaatctacacagtgctgaggagaacaagttcctggatcatcctgcaacctggaggggacggccctggggctttcagggccctggggctttcagggtggagcgtgaacaggcctccgggaaacatcttccatcagccaaaccctcctgctgccttattgaagaagtccctcttcaggctcttctgctcacgtctctgaatctctccttggcaaaggctcacgtgggctctggcaccggcgtcatgcggaggacaatgaagggcagccgggcatcttggggtgactcccggagccccgcctgcacccaggccggctcttcctgcacagtggccctgcctgaggctgctttccaccagcaggaatcgaaactgatctggatgagaacacgtgtgtggagggaggaggcttggctagaaatgagaaagagcaagaacacctttatgaggcagagaagggacagtgacgaggattagggttcagggctgcaggctgccccccagctggtcccccagcccaggcccctccccacccctccctctagccgaactctcatcagcaggaccaggtagcacagtgcttggcccaaaaagaacaaattgaagttattcagagagctcaggaaacccctcttacaggcatcaactggtttccaggaaaagagagaggttaaaagccgaccccaccactgcaatgactctcttttgagccctaaagcaaacagaaaaatcactggggtacggaagaaacatttagcatagtggtgcccagactttggtaagacaagaatcttccaagatttgtgtgcttgggagtagggctagaaatgtggattctctttttctttttttgagatagggtctcggtctgtcgcccaggctggagtgcagtggcgtggtctctgctcactgcaagctccgtctcccgggtccacgccgttctccagcctcagtctcccgagtagctgggaccacaggcgcctgccaccgcgcctggctaattttttgtatctttagtagagacggggtttcaccgtgttagccaggatggtctcgatctcctgacctcgtgatccacccgcctcggcctcccaaagtgctgggattacaggcatgagccaccgcgcccggcgtatattttctctcagcataaacaagtttcagtcttactgatgtgtgttaaactgttcccccatttatactcagctggttcgtggtttttaataatgtagatacaaatgtaaggaatatttatatgtacataacttttcgcttttaaaacgttgttaggccaagcgcagtggctcatgcctataatcctagcactttgggagactgaggcgggcgcattgcctgagctaaggagttcaagaccagcctgggcaacacagtgaaaccccgtctctactaaaatacaaaaaacatcaactgggcgtggcggcatgcacacgtagtccagctactcaggaggctgaggcaaaagaattgcttgaattcgggaggcggaggttgcagtaagccaggatcgcaccaccgcacttcagcctgggagacagagtgagactccgtctcttaaaaaaaaagaaacaaaacaaaaacaaaaacaaaaaaaaaactgtgacaaggtcgggcgtggtggcttatgcctgcaatcccagcactttgggaggctgaggcagccggatcacctgagttcaggagtttgaaaccagcctggccaacacggtgaaactctgtctctactaagaaaaacacaaaaatcaggggctgggcgcggtggctcacggctgtaatcccagcactttgggaggccaaggtgggcggatcacgaggtcaggagatcgagaccatcctggctaagacggtgaaaccccgtctctactaaaaatacaaaaaattagccagggatggttgcaggcgcctgtagtcccagctactccggaggctgaggcaggagaatggcgtgaacccgggagggggagcttgcagtgagcggagaccgtgccactgcactccagcctgggcgaggagctagactcttgtctcaaaaaaaaaaaaaaagaaaaaagaaaagaaaaaagaaaaatacaaaaattagccaggtgtgatggcaagtgcctgtaataccagctactcggaaggctgagacaccagaatagcttgaatcccggaggcggaggttgcagtgagccgagatcgcactactgcactccagcctgcgggaaaaagtgagactcagtctcaaaaaaaaaaaaagaaaaaaaaaaataggaagcaagctgggtatgtgcgtttagaggtgctgtacattttcagcattataaatgaatagagatgagtggcaatagtttttttggtccatagatttttggtatcttaactagttttggatctcttcaactaaagggactgcctgttgaacgttgttaggaatataagtactgaaggcaaactgcctgggtttgaattttgttctgtcccttgcaccctgcctggcttcaaatcctagctctgcttattaaagttcttttaagggatgatctttgagcaaatgtcttagcttctgttttcccaagtaaatggacacaatagttgctaccttgtgaaagattcatgtaattgaccagtgtttaccaagtagcatcagtgttcagtttcagtcattggtgattctgcagttggattgtgaggtggtgctggggtgggggtggtgtgtgtgtagcacttaattgcacacagaaaggaaaagatactttttataaccgagaggcagcttttctcttccttttgtgtcaaaagggaagaagggagtttggagagggaaaccaattctctgtaatactgagctctcttcctcaaaatcagaggtagatagaatgtgtaataatttacagaatttctagactgaaacaatctgatttttttaaatgtatttttattttttcaggttgagactgaactaaagttaatctgtggcgacctgctggatgcactggacaagcacctcattcagcagctgacgctggcaagtccaaggttttctattatgaaatgtaggttctatactagaaaggaaaatgtaagattaaaagttggcctttttagaatcatgacttccttctatgtaggtttccaacttttttaaaaaaataattgtttaatgttagaaggatagttaatgtgggaataaacagatggtcaggctattataaaaatgcattagcttttgctttacttacttatattcttttgctttcatgggacctatctcattcccctcccccaaacggccacacatttcacagtgctggctgaatgtttcatgtagacattttattttatgattaatacacttgtgccatttcttggaaccacttgcttgtttaattctagtctatcaagtgataattttgttgatatttagaggctcctcagttaatttctgtgggatttttggttatatttaataaggaaaatgataggaaatatctaagaaaaaagaaacaaagccaattattcctgagcgtgtttaaaattattgaagtacacttgttaatttttagtatagaacctacatttcataatagaaaaccttggacttggcagtgttagctgctggaataaggtgtttgtccagtacattcagaatgtcgccacagattaactttagctcagtctcaacctgaaaaaataaaaatgaattttaaaaaattcagattgttgaagtctagaaattctgtaagttattacacattctatgtacctctgattttgaggaagagagcttagtattgaacagaattggtttccctctccaaactcccttcctcccttttgacacaaaagcagagaaaagctgcctctcggtcatcaaaagtatcttttcctttctgtgtgcaattaagtgctacacacacacacacaccacccccaccccaacaccccatcacagtccaactgctgaatcaccaatgactgaaactgaacactgatgctacttggtaaacactggtcaattacatgaatctttcacaaggtagcaactattgtgtccatttacttgggaaaacagaagctaagacgtttgctcaaagatcatccccttaaaagaacttaataagcagagctaggatttgaagccaggcagggtgcaagggacagaacaaaattcaaacccaggcagtttgccttcagtacttacattcctaacaacgttcaacaggcagtccctttagtggaagagatccaaaactagttaagataccaaaaatctatgtaccaagtaactattgccactcatctctattcatttataatgctgaaaacgtacaacacctctaaaggcagatacccagtttacttccttttttttttttttttgagagggggtcttgctttgttgcccaggctggagtgcagtggcgtgatctcagctcactgcaatctccacctcccgggttcatgtcattctcctgcctcagcctcccaaggaggtgggaccacaggcgcccaccaccacgcccagctaattttttgtatttttagtagagacggggtttcactgtgttagccaggttggtctcgatctcctgaccttgtgatccaactgcctcagcctcccaaagtgctgagattacaggcatgagccaccacgcctgggctattttttggtttttagacagtcttgccctgtcacccaggctggagtgcagtggccctgtctcggctcactgccttccaggttcaagcagttctcatacctcagctccctgagtagctgggattacaggggcgtgccactatatctggttaatttttgtatttttagtagagatggggtttcaccacgttgggtaggctggtcttgaattcctggcctcaagagatccacctacctcggcttcccaaactgctggattataggtgtgggccacgtgccgtggcccaactgtactatttcaatgaagctcctgtaccctaggtcatcactgacttcccagttgctgaatccagttgtcgttactgagttcgtccttaatttaactttcttttgcattgaagctactgaccacagcattttgaaactctattcctttcattactgtgattctactttccttgtttttcatcttatctcttagtctgtggcttctcagacttcctcacaattgattgcttattttaaaaattcaaaaatttaaacctcctgagcagttcaaaaataatatacttttgaaatttttaaaaacttttctaagagttccaaggataggttggtgatcaccagttgataccattttgccatattttctttgtctgtgtgtccctccctttctacctgcacccacatatatgtatatctatgaatattcacttttttaactttaataaattttcttgctgtacaatttgagagttaactgcagatttcatagcacttcacccctaatttcttctatatatctcctaagggcttttttttttttttttaggaggagtctcactctgtcacccgggctgaagtgcagtggcgcaatcttagctcactgcaacctccatctgctgggttcaagcaattcttctgcctcaggcccacaagtagctgggattacaggtgcctgcctaatttttgtaattatagtagagacggggttttgccgtgttgaccacgctggtctcaaactcctgacctaaggtgatccgccctcctcggcctcccaaagtgttgggattacagacatgagcctcctttcccgacctccttttccttttgtaattaacaagtgatctatggaatgatagaaacagtgtgaatattctgtcccataataatctttacttaatggttttatctggattgcctcttgccaaatcaaatattactatgattataaaatggagacttttctattttttctgcattttttctatattgtcattcttctgtaaagatttttttatgctccttttttttttttttttttttttgagatgaagtctcgctttgtcaccaggctggagtgcagtggtgtgatctcagctcactgcaacttccgcctcccgggttcaagcaatcctcctgtctcagcctccagagtagctgggactacaggcatgcgccaccgcgcccaactaattttttgtgtttttagtagagatggggtctcaccatgttggccaggaaggtctcgatctcttgaccctgtgatccagccacctcggcctcccaaagtgctgggattacaggcatgagccatcgcgcctggccctatactccctttttaaatttttttttttttttgagatagcggttcactctgttgcccaggctggagtgcaatgatgtagtcttagctccctgcaacctccgcctcccaggttcaagcaattctcctgcctcaacctcctgagtagctgggattacaggcgcatgccaccacacctggctgatttttgtatttttagtagagatggagttttactgtgttggccaggctggtcttgaactcctgacctcatgatctgtctgcctcagcatcccaaagtgctgggattacaggtgagagccactgcacctggcccccccccccttttttttttttttttttttggagacagggtcttcctctgttgcccaggcttgagtgcagtggcgtgatcgtggctcaccacagccttggaccccaggctgcctcagctcactgcaacctctgcttcccaggttccatgattctcgtgcctcagcctctgaagtaactgggagtacaggtgcgcaccaccacacctggctaatttttgtatctgtagtagagatgaggtttcaccatgttgggtaggctggtctcaaactactggccaacatggtgacccacctgccttggcttcccaaagtgcttcatattgttagccctaattctagtcgaattccatagcgttctacttctttatttttatttttttatttttgaggtggagtctcgatctgtaccccaggctggagtgcagtggtgtgatctcggatcactgcagcctccacctcctgggttcaggcaagtctctgcctccgcctcctgagtagctgggattacaggtgcctgcccccacgcctggctaatttttgtatttttagtagacgcggagtttcatcatcttggccaggctggtcttgaactcctgaccttgtaatctacccgcctcggcctcccaaagtgctgggattacaggcgtgagccaccgcgcctggccacattcttctttcaggtcatatttggatctccgttttttctacagtgagaactctggtaacaacataaataaatgcattcatttgttcagttgtacaatatatgcgtaatgaaaattataataccaatagtatttccagctacaaacctactaagtttgatttaatatttctttgcaatttttttgtgtgcttacatataggctactaagggtgtgcagtctgaaattacttaagtatctttttctcgccaggagcagtggctcacgcctgtaatcccagcactttgggaggccaaggcaggggtatcacgaggtcaggagttcgaacccaacctggccaacatggtgaaatcccgtctctactaaaaatataaaaattagctgggcgtggtggcaggcacctgtagtcccagctgcttcggaggctgaggcaggagaatcatttgaacctgggaggtggaggttgcagtgagccaagaccacgccactgtactccagcctgggtgatagagtgagactctgtcttaaaaaagaaaaatcttttccttttatatcttttttctctttctctttctgtggtgaaattattggtgtcatagtcaattaaatttatgtattcttattgtattcagttctgcttcccacccctcatccttgttgattttattttatttttagaatatattaaacattaatatggttcaaaaagaaaaatctacattttataattgcaataatatttgatttaggaaagaaaaaaatggatgataaacccattgaggttttactcagagggtatactcaaaagtctgagttcttgtccttcccttccattatcattagcttttagtttatcttagttgtcttcatttttgcaggtataagcagatacatattatatgtatataatgtattatattatatatattatatattatatatattatatatatttattatacatattatacatattatatattatatatattctcatttcccctttcttgtacaaaagatagcatagtatccatgctgctgtacttttaaatactcttttgtatcttgtttttatagagatgtttcttattttaatagctttgttacacgttgtgtagattccataggtttttggccaatatcctatgtctgagcatttaggctgtttccagtgtgtcagtttcacagataatgttgcaaccagtaacctgtgtatttgctttccatattacttatggagatgtaccattgggttaacttcctggaactgatacctggcatgtctaaaacagggcatcgttttcccaaaactttttcactttcatttgccagtattgaatggcaccattatctatcctattacttatgcagaaataaaggtatcttcatttcctctcatgtctagtttgtcagcaaatgcaaattatgtattcttagcctttcatttttttctaccttcattttcttacagatcttcttagttggtttattatactagcctcctaactagtctcatttctctcctaatactccctactgctactagatgtgtctttcataaagccaaaagtttgttcatttcacccagatcttcctttgtccagaccttccatttcctggcctctacctgcttctgtagcctaatctctaacacttctaaccatgctgaactacttgtagattccccagacatatcctgtcctatcaagcctcttttgcactggaatgcctttttttttttttaccttctacatttctttctttctttcttttttaaccatttttgtggagaatggggtcacgcttgttaccaggcagatctcaaactcctgggctcaagcgatcctcctgcctctgcccacctaagtgcggggattacagacatgagccaccgcatccaggccacatttcattttaataaccttcaagcaagactttttgctaggtcagatgtagttcccctgtttacccttaccatcctgcgcttacctacattgacttgtctttttttccctgagactttgggctcctgtggacttttggactcctatggacagggcattccttcaattctgctttcatggcacagcctggagcatggtagacactcaatagtttgtgaatatgtgaataaacttgatctgattaccgatatcttttttaaaaagtctctttaggtattcatttacatgttcactgcaaaaaatccaaactgcacagaggcatatataaagtgaacattttccattaccccatctcagtgtctagtgggaactatggttaatagttcaatattggcaagaaaaacacaaaatagattttccagttactatagaataaaaatgttcactattttgttcttatagatcatctcttttccctttaggcaatgatagtaggaaatgctaaagatacagctcatacaaaagcagaatggaatattctggaagaagtaaagcatcccttcatcgtggatttaatttatgcttttcagactggtggaaaactctacctcatccttgagtatctcagtggtcagtacacagagtttggtgtaattatttgcatttgctccagaaactgggtcaaaatgttatttttcaacggaaaaatactttttcccattatgatcaaatagtgcttaaaattgatgagtacgctgaagtacaaaattcagatatgaccaaatgtttcttttggcagacaaatatggaggaaactgaagatttttttccctcatctgtaaaattttatcttatttcctttgtaatcagtcacttaacagaaaaacaaatacctaagtgatgcagagccatcaaattgtactggggtaagatactgtaatttaaataattgggaggattatttaacatactgactatttttggaattgggtctttaaacaagagtttttgtttattgtagccttagtgatggggtgtgtagcttataatggaaatcatccacatttgccagggcctaccacctcataggaacttgttgcttccatatcatttctaatcactggtatctatttcttttttcttttgagatggagtttcgctcttgtcgcacaggctggagtgcaatggtgtgatcttgggtcactgcaacctctgcttcctgtagttcaagcgattttcctgcctcagcctcccgagtagctgggattacaggcatgtgccaccatgcccggctaatttttgtatttttagtaaagatggggtttcaccatgttggtcaggctggtctcgaactcctgacttcaagtgatccacctgactcggcctaccaaagtgctgggtttacaggtgtgagccactgcacccgaccacaggtatctatttctagcaaacacagttcagttctctgagaaagattttgcagtaacatgtaacatggaacagaaaggtgcagaatgtagcaacttttttgtgactattgccattggaaaaactttttttttttttttgaagatggagtttcactcttctcgcccaggctggagtgcagaggcgtgatctcggctcaccacaacctctgcctcccaggttcaagtgattctcctgccttagcctcccatttagctgggattacaggcatgcaccaccacaccaggctatttttttgtatttttagtagagctgggctttcaccgtgttggccaggctggtcttgaactcctgacctcaggtgatctgcccgccttggccttccaaagtgctgggattacaggtgcgagccactgtgcccacccagaaaaactttattttgacataatttcatatttaaaaagttttaagagtagtataacgaattcctatgctaggctcagtggctcatgcctgtaatcccagcactttgggaggccaaggtgggtggatcatgaggtcaggagtttgagaccactctggccaacatagtgaaactctgtctctactaaaagtagaaaagttagctgggcatggcggtgtgctcctgtaatcccagctctttgggaggctgaggcaggagaatcgcttgaacctgggaggcggaggttgtggtgagctgagatcgcgccactacactccaacctgggcaacagagcgagactcagtcacacacacacaaaaaaagaattcctatatatctctcacctggatacctgggttcctcaaatgttaccatttcaccacatttattcaccacatttattttgttttatccttctatatatatgtatatatgtgtatacatatatacatgcatgcatgcataattttttgaactgtttaagagagtgttacagacatgatttccctttacccctaaaatttcagtgtatgttttctttcttttcttttttttttttttttttttttgagatggagtatcacactgtcgcccagactggagtgcagtggcgcaatctcaggctcactacaacctctgcctgccaagttgggattacaggcacccaccaccacgcccggctaatttttgcatttttaatagagatggggtttcaccatgttgcccaggctggtctcgaactcctgaccttaggtgatccacccgcctcagcctcccaaagtgctgggattacaggtgtgagccactgcgcccagcctattcagtgtatattttctaaaatcaaggacagtatcttacataactatactaaaatgatcagaaataggaaattaactttgatgcaattataactctccttagtttcctttaatcaggaacatttcctcagtctttctttgactttcatgatgttgacattttttattagtacaggccagttagtttgtagaaatgctttgggtttagctgatgttttcttagtattagattcaggttatgcaatgttggcaggaccattgaactgacattgtgtcctccttaatgcatcagatcaagaggtacatgattatttatatatttgtcccattacttgtgatgttaacttcagtcacacgtataaggtggtgtgtgccggtttttcccctggtgacatttttgcctttgtatttagtaagtatcttttgaggagatactttgagattatttaaatatcttccatcaaactttcatgttcagttttgttcttgttgctattgttttttgagacggagtctcactctgtcgcccaggctggagtgcagtggcaggatctcagctcactgcaacctccacctcccaggttcaagtgattctcctgcctcagcctcccgggtagctgggattacaggcaggcaccaccacacccagctaatttttttagttttagtagagatggggttttgccatgttggccgggctggtcttgaacccctgacctcaggtgatctgtccgccttgccttcccaaagtgttgggattacaggcgtgagccactgcgcccagcccacattcagttttgacatccattgattcttgcctgcaacaattaattgtgatgtttgccaagtaattgttcttattccgtcatgccttcttcatttattacttggcattctaccgtaataaagaactttctcttcttccccatttaaaaaatttatgtattcatttatttatgtcattgtgggcttagggattctaataccattcaatgtgatataaccctttattatcattatttattttgatactcaaattgtgccatgttttttactaggccactgccaggttcattctgtttatttaagggttctgaaaatacgaaatatgagcattcactaaaattagtgagggtgatttaattgtagacgatcatttttctacttatgggtaaaatgttaaagagtttttaatcaagattttttttttaacctcaggtctggaatctacaaatatttcaaagtttctagatataaaacctggaattccaaggcagttctagtttttaaacatatgtgtttcacagaagaataagaatgctactaaaaatagaatcctgaggacttagttttaaaacctataatttttaggatctgtttttcatgtttaaggggctgatgtcttttaattatggttagaaggaaagcacaaactctctcattagaagtgggttggaaataaatgttttatttctttttttttttcctttttttttgagacggagtctcgctctgtcgcccaggctggagtgcagtggcgcgatctcggctcactgcaagctccacctcccgggttcacgccattctcctgcctcagcctcccgagtagctgggactacaggcgcccaccaccacgcccggctaatttttttttttttttttagtagagacgggagtttcaccgtgttagccaggatggtcttgatctcctgacctcgtgatccgcccgcctcggcctcccaaagtgttgggattacaggcgtgagccaccgcgcctggccatattgttttatttctaatgttttttctttttctttacaggagaactatttatgcagttagaaagagagggaatatttatggaagacactgcgtggtaagtgaactttttgtggttgcaaagattcaggtaattacaagcaaagccccattcccactatgggcagccacatgattcagtaaattgatctggagccagtcactcactcaggacttcacgggggagaagcagttttgggactgggcgggtatggaggtcacatcactcctttgcccttaggcttgagtggaacgctcttcacaccagttgttcctaacagaaccattctcattgctgcttgctttccttgaattggtgagctgcctgccttgactgtgggtgagtgtggttttccagtgaacctttatgtgtggaacaatggaaattatcagaaatcatctccttttttttttaggctttctatttctcaaggtgcagtcttagggaggtgataagcctggcatatcatctgtggtctgattatatagtcaggatgggatttaccctcctatttctaaacatgtcatctgcttcaaattaaaaatatgcacatcattttgtgaagcaacaatattggatcacaataaatcagtttatcctacacattaatttaatagaaaataacacttaaatgttttttctaccttaattaccaaaactgcattccattgtttaatttcaggccttttctaacacggaagctgcatttaagagccttagggatgaagtgcccttttgtggaggaggctcactgagcagtgttggaggctgtgtttgtggtcgtgctggctgtgaaactgcctcagtccttcctctaggacacaccctctccatcctggaataatctgcaggattgcaacattgttaagcagccagtattgcggtgccttgtgcttttcacatccagacagggttgattcagccctttattcttttgaggtagataaatttgggtgtcacacagtttatagttgtgggctggctggctggagggagggcggatactgtgggccttagctgtctataaatacgtagctgtattaagtaagggatgagtgggcttctaagggtcaggttataagatagcttttgaaatcaagacttgatctctagaataacaacgttcctatttcctatgggattttaaagttgagtgtggatgggagaaatttgttttgaaatgaatgactattagcttaattcctacagacagaacaaaacatgaccaatggcagtttagcatattctggacatctttgcaattttagcagtatgttctaatggcaaaataaagcactttatagtttcactaaaatgagtgaaacataaatgtccccatgccttttggcagcatcctatgccatctcttcttcccatacatccctgtaccccactaatttggtctttggtgcatgtctgtttctttcaaggaattttgctccatacataaactgttttggatagattacactctttttaattctattaaatcacttctgtttccagcttttacttggcagaaatctccatggctttggggcatttacatcaaaaggggatcatctacagagacttgaagctggagaatatcatgcttaatcaccaaggtggagacataccataaacaattctatagtaaataatcatcttaaaatcctcccacacaggtcatggccattttcaaagccccacagtcatctctctattttgtatatttcctccctcagaatttatggcatcatagtacttgctgatgttttaagtctttaggtaattacacttggtgagagtaaaagaagttgaggataatagttgctcaattgccttttttagtttaatccttactctatagtttttcatgtttttggaatccttacataaaatgttgtgtaatgttttagactataaaagccagtctaaacattaattttggcttgttacttaaattgaaaagtgaatcttaattatataagtcgagttttagtaatgaaaatatgtaattattggctgggtgcggtggctcacacctgtaatcccagcgcttcaggaggctgaggcgggcagatcacctgaggtcaggagttcaagacacctggccaacatggtgaaaccccatctctacaaaaaaaaaaaaaaaaaaaaattgccgggcatgatggtggatgcctgtaatcccagctactcaggaggctgaggtgggagaatcgcctgaacccagtaggcgaaagttgcagtgagccaatatcgtgacattgcactccagcctgggcgacagagcgagactccatctcaaaaaaaaaagagaaaagaaaaagaaaatatgtaaatattagaagctatgcttcttacagtaggttttattaatgctggaaaaaggattgaaatggaaccaaagtatttgataaaacttggggaatatgatgtttaataggcatcaggttactctttttttttttttttttttttgagatggggatctcactctgtcacccaggctgggatacagtggcatgattacagctcactgcaacctccgcctcccaggctcaagtgatcctcccaccccagcccctcaagtagctggggccactgtggcacaccaccacgcctggctaatttttggtattttttgtagaaatggggtttcatcatgttgcccagggtggtctcaaactcctgagctcaattgatctgcctgcctcggcttcccaaattgctgggattacaggcataacccacctcccccactgccagaatcagtttattcttgctgtttgtttgcaacaacaaacataaacatcagagagaccgataatctatacaactatagatatagcaccgtgagccttgactacaactgcctgctgctacagacagctcaatttatgctaatctgggctgtgggtagacttggcaattcactcataccccaaaggagcaaccagatgacccagggtatctagaaggtggtagcagctgctaatccttagatgtctacagaacaatccatgaggtagttaattgtttcaaactcttagagaatgatgtatgaacaaccaaggctcatataaacattccagattatactcctccacccaccttttttttttttaaggagaaatgatatacttaactgaatagatcatgggaatcagcgtctcttccttcctctcatcaacacctcctcactccccaaaacctggttctgatctgaattctaagtcacaggatagaataggggagtgatagaatagttgacttctcctttcatttataaggttgagtgtatcagatggttctgtgaaaataaaggccatacttcttctgtatcagagtgtagtatatgtttacatttgaatcaataggtcattgtgccttttctatgaaatgaacctcaaatactagagcccctgaggttgttgaaccacttgttatgacagtccagtaaagaaagctaaacttgaactgaaatgatctttgtataaggtggtaagttttttactttctggatcagcgatgattgattcatactatctagcaattttctttctttcccctaattggtagcattgggcagaatgagctaccttgttatagtgactttctgagaccattttaagaactcttcacagttcactgtgataaaagctatatatttgaagtactatctcacacctttgtttaaaaggtacagaatatgtttattagggtctgtgtacttaaactagactccataaaacagtttttccaggatttttctttttcaggatggtagaggattctgtgtatacttaaagctagagccttaaacaggttatttcacttttttctctatctttattttctctttaccagatagattgtatctttggcaaatgtgactttgccctagccttaaacagttagcatcccattttatggatggtaccttgttcttgacatctgcaagaaaagtttgaggcaagaaaagttaaatggaaggatagattaaggtgttatatgacatgttcaaacactgcacatacttagaattctgagaataatcatgctgtaatctttcattgcaggtcatgtgaaactaacagactttggactatgcaaagaatcattcatgacggaacagtcacacacacattttgtggaacaatagaatacatgtgagctgcatgttaaacataattggtttggaggtaatagctaattttacctgttttaaggaatagtatctgttttctgtaccctcattgactctgtatattgtttttaaaattctaattcacatgatatgccaatgggggcattttaaagcatattattttcctcattgtacggcccctgaaatcttgatgagaagtggccacaattgtgctgtggattgttggagtttgggagcattaatgtatgacatgccaactggagcagtaggtgcacagttaaaagctgcatgtattatggtctatgctgagtcactgtagcaagagacctgtcctgtgctttctgaaaatgttaccaatggagttttcaaagcccaaagatttgttattagcagtttaacactaataatgctgtatgattatatgggatcccatactttgagaaacattttcgttgaaatgatctgtgtcatggcaggcctgtgaaatagatgttgaacagataatgctcttatttttataaatacagaaattgaagcataaaatcacatagctcacttattatcacacagcaagttaatggtggaaacacaggcttccttccaggacactgctacttcctctgtcctgttgcttaaaaactgcacgtctgccaggcacagtggtgcatgcctgtagcccaagctactcaggaggctgaggtgggaggatcatttgggctaaggattattaatagaatctagccttgacaagagaccctgtctctaaaacaaaataaaggtctttagcagttagcccatttcacagcatacatttctgatctccatgcataactaattcaggaaatggatatggttatttaaaatttgtttcttatatactaatatttttcacttcctgctaatatttttcacttgtcttctactcttagcctccatttactggggagaatagaaagaaaacaattgacaacatcctcaaatgtaaactaatttgcctccctacctcacacaagaagccagagatctgcttaaaaaggtaaggttcttaaatggtcactgacagtataagattcaatgactaggatttaactagatagaatttaatgtatattttgaataatatatagtgaacaaaaaaaagtcttcaatttttgaaggcgaagtacagatttgtttaacgactttcttttcatattctttttttttaattcttttttttgagacagagtctcgctctgtcacccaggctggagtgcagtggtgcgatcttggctcactgcatcctcagtcccccaggttcaagcgattctcctgcttcagcctctcgaatagctgggattacaggcgcccgccaccatgctccgctattttttgtatttttaatagagacagggtttcaccacgttggtcaggctggtctggaacacctgacctcaggtgatccacctgccttggcctctcaaagtgctgggattacagacccttaaacaattattcagtagtaattagtaaactatatatttttttcttttctcttttttctgagatggagtcttgctttgtcctccaggctggagtgcaatggcatgatcttggctcactgcaacctctgcctcccaggttcaagtgattctcctgcctcagtctctctagtagctgggattacaggcgtgcgccaccacgccaggctactttttgtatttttagtagagaaggggtttcaccatgttggccaggctggtctcgaattcccaacctcaggtgaaccacctgccttagcctcccaaagtgctgggattacaggcatgagccaccatgcccagccaataaactatattttctcaaggcaaagtagacaagcaaagtctaaaaaggaaaaaaatcagtttgactaaagttctttatccaggcttttttatcctttttaaagctactgaaaagaaatgctgcttctcatctgggagctggtcctggggatgctggagatgttcaagtaggtattggcatctttggtgttttgtggggaagataatgctagttttatgtatttctgagggttatatgtagttgcttataagttagcttattttgtgacttgtaacttcaaaaaggtgattaatttatcaatccagcaaagtctattcccctcaacttttctttctgctttttttttcctaggctcatccattctttagacacattaactgggaagaacttctggctcgaaaggtggagcccccatttaaacctctgttggtaagtatacatgaaagcttataattgggtgcagtggctcacgcctgtaatcccaaaactttaaagggccgaggtgggaggattgtttgaagccaggagttcaagaccagcatgggcaacataacaagactccatctctacaaaacatttaaaagtcagctgggtatggtggcatgtgcctgtaagtcccagctacttgcgaagctgaggcaggaagatcgcttgagatttttttagagtaagaaaaatctcagagcagacagaaacgttatttttattagcagttcaaagatctctggtttatcctctcttcagcatctttgtttttattatttatttattttattttgagacgggctctcactctgtcacccaggatggagtgcagtagcacgatcacagttcaatgcagccttgacctccccaggctcaggtgattctcccacctcagcttcctgaacagctgcgactacagacacatgtcaccatgcctggctaatttttttgtatttttttgtagaaacggtttcaccatgtcgcccaggctggtctcgaactcctgggctcaagtgatccacccacctcagcctctcaaagtgctgggattacaggtgtgagcttctgcacccagccaagcatcttttatttttgtactatcttttaaagaactaaagccagtggcaattgactgtattagctatttttaagtcagttacctaagacaattaaatatttcgggtagttgggacctttctttttttggtttgttttattttgcttaatttaaccattttaaatatgattctttgggaattttttcttcaaaatatagaatatatgtgcattagtttgctaggcttgctgcaacaaagtaccacaaaccaggtggcttagacaacagaaatttattatctcatagatttggagactagaagttctagatcacattgttaagagttggtttctttgacaaccgtgacaaactgtatgttccatgcctctcccctggcttctggtggtttgctggtaatctttgtcattctttggcttgtaggtgcatcacccggatctctgccttcatgttcacatggtgttctacctgtgtgcgtatctgtggccaaatttcccctttttataaggataccaggcatattggattagggttcctctctactccagtaggacctcatcttcactgattacatctgcaataaccctttccaaataaggtcacattctgaggaactagaggttagaatttcaacatattaaattttttggggggtgggtaaggcacacgattcaatccataacaatatgtttatgagtaaatgagttagtgtgttagttattgtctttctcccacttcagaatctgagaaaacagtttctttttccattccttgggatgtaggtggaggaggaggaggatgatgatagtgattattttttggtcatggagcataatgtgacccactttaaaaaacaacaaacaattgtaaggaggatgactgtcatacacctactgcacagcttaaaaatgattaggtcatcttgtttaaacataactgccatcccaccatcacacctaagaagttgacagtttccccagttttttttttttttttttttttttttgagatagggtctttctgtgttgcccaggctggagtgcagtggcatgatagtggctcatggcagcctcaacctcccaggctcaagggatcctcccatatagctgggaccacaggggtgcatcaccacacccagctaattttttgaatttttctagagatgaggtctccctgtgttgccccacctagttttgttgttgttgttgttgttgttccattctttttttttttctcctgtttgtaaggatttaatcaaggtctgtatatagtttgattactatgtctcttaagtctcttttcatttatagattgccctaatgatttattgaagaaactgggtcatttgtcctgtagaattctcaaattttgattttgctgatattatccccataggtgtcattgcccatgttcatctgttccctgaatttccaaaaactggtagttaaatttaggtggttgatctgattcagattgaactctcggtattgcatatgctttgatcaggaggcataatgtgtagtttgtgtgtgtgtgtgtgtgtgtgtgtgtgtgtgtgtgtttagtgatgttagtggtcactgatcattgcctgtgtcagcatttcactaccagggtaatttggcaatgtctggagacacactgattgtcacagcttgggggagggaatgctataggtaccttcaggggtaagagtcagcacagcacagccccctacagcaaagtattaataggcctaaaatgtcagtagccctgaggttgagaaactctggcatacttttataatttcatcaggtgtttgtgaaatggttttattctgttatttcttctttctttgttagctggaattctttcataaagagaaactctttgaacagttagttacacaaggtatagttcatacaggaaaggcaggatgtatgtttgattctttcctagttttcaaaataatgaattagttccctagcatcttccaaaattgaccaatgaactttgtgtatgtgtttttttcttctttagtatattatgaacttacacgttttaacatatttgtgtttcatttcattgcagttatttttatttttatttattcatttattgttttgaggcagggtcttactctgtcacccaagctgtagtgcagtggtataatctctgcccactgcagccttgacttcccggcctccagcagtcctcccacctcaccctcttgagtagctgggaccacaggtacaccaccacgcccagctaatttttgtgtttctggtagagacagggttttgccatgttcaccaggctggtcttcaaatcctgagctcaaaagcaatccacctgcctctgcctcccaaagtgttgggattataggcgtgagccaccgtgcctggccgttatttttattgatgctcattttttcccttcgttgaatgctgggtgcatcttcatattgggttctgagtccttttgacgagcacgttgtctggtgttggacaagagagcaaaataaggaaactgctgttctctgcttatcttttacattttccccacatttggaatcagccattcctccagggagtgcaagttcacagtctgggctctaagagaattatcaggtcaatgtggtcatcttttagtattaagtcagatattctaaattattatttacttcctagatttggcccaagagtctaaccagatattttgggaaagagacaaggaattacataaatcaatctcatggttagaactgaagtgataactatactttcacaagggaatataacttataacccatgcagaatagaaaattatttttgctcctttagatttctaaaggaatgaaataagctgtgggaagaaactttaactggagcatcttaccagtattattcatgttttaactctgcttcagtagtttttcaggtttgttacaaacctgcagtagccaactgaactaattatctctaaacagggatttagccagtgtactaagcacactgaagctttgtgagagaggaaattgatattcacattttttccaacttgttttgagctcaatgtattcactttttttgttttgttttgttttgttgtttttttttattcagacagactctcgcgctgtcacctgggctggtgtgcagtggcacaatctgtgtttgcggcaacctcttcctcccgggttcaagcaattctcctgctttagcctcccaagtagttaggattacaggtgcccaccaccacgcctggctaatattttgtattttttgtagagacggggtttcactatattgaccaggctggtctcgaactcctacctcatgatctgcccgcgtcagcctcccaaagtgctgggattacaggcatgagccaccatgcccagttgatatattcacatttttaataggaataacagtatactaaaatctattttaatgcatgtttaagatttgaagatgtaatttgactcagtactttccacctgcatttttttcttcattctgtgcctgctaagactattctaatactttattatagttaacccctgcgaaaagagctcccagagcttacagtgcatttgattgatgtaatatggactattcattattttctaaattattttgtttgtataaagcaatctgaagaggatgtaagtcagtttgattccaagtttacacgtcagacacctgtcgacagcccagatgactcaactctcagtgaaagtgcccatcaggtctttctggtaagtgaaagaatttccatatagttgtgggaaattttaagtatgaggatgggctcttcgagaagaaaattcagtttgcttgctttgcagttcatgtaggtaacctcgcccgctttttttttttaataagccatgctcttataacttattgatacctacaaaattgattttcgtaatccaacattttattttagcaattagagtgggaatgtacaattctttggagagtatgattccctttttcggttgggccacagacttaaaatgatgtttggcttagcatctcaaccaaaaattaagtcatagcagtgggggagaaaaacctcactaactacatgtattttattcctgaaacagctatagatttttggtacctttttttttttttctgagacagggtctcaccttgcccaggctgggtgtagggtgcagtggtgcgatcacagttcactgcagctttgacctcccaggctcaagtgatccacccatttcagcctcatgagtacctggactacaggtgtgtgccacatccagctaatttttaatttttttgtagagacagagtctgttttactcctggactcaagctgtcttcccaccttggcttcccaaagtgccaaaattataggcctgagccatcattcctggccctatttttggtactcttaacataagtagggtttttttttttttgagtcggagtctcgctctgtcgtcaggctggagtgcagtggtgcgatcgcagctcactgcaaactctgcctcctgtgttcaagtgattgtcctgcgtcagcctactacaggcacgcaccaccactcccagttaatttttgtatttttagtagagacagggtttcaccatgttggccaggatggtctcgatttcttgacctcgtgatccacccgccttggcctcccaaagtgctgggattacaggcatgagccaccgcgcctggccaagtaggggattttttaacattaattgtgaatatttgacatcaaaatatattggatcatatgtaatagtgaattctcattgtagaaatatctgtatagatttatagcttgtctcttcagaaaagtaaaggttttagatattggccaacagaaatgatggatttatatcagatgaccatcaatgcatattattttgcttaaatatcatatatggttattttattactgtacttatatgtcacatgaacatgtatctcattttgtatccttttttttcttttgtcattcctttttggactacctctagggagaatagaatatggggaaagcaattgtttctgagtgtttttttccctctttttgagtacactggatttgtcactaacttaattctcaagcttttcttccccacactgctcactatgtaacacaagtagtgttgtatcttatgggatgggaaataagctctaataataagctcatggggcatggtggctcacgcctataaccctgaggtcaggagttcgagaccagcctggccaacatggtgaaaccccctctctactaaaaatacaaaaatcagccgggtgtggtggcatgtacctgtggtaccaactacttgggaggctgaggcaggagaatgacttgaacccaggaggcagaggttgcaggagccaagatcgtgccactgcactccagcctgggcgatagagtgagtgagactctgtatcaaattaaaaaattaattaaaaaaataaagttagcatggaatgcaaaagtgtgtagtacagtatggtttcgagtaaacaacactgaatagtaataatcctataaattagtaatatagagcatgtaggcaaaatataatcttacagtattaattacataagagataaaagatgagtgagtgcatgcatgtttttaaattcaagtttgatgtgtgcatgatcaaagttatgacatctctgttagtaaaatcttaggttcagttaaggaaatgagcatgaatcactttaattttggcttttttttcctctcatgtgctactgatgtggaatttatacctttgatttaacatagagacctcttcgtcaactgaacattgcaaaatttcaacttatgtgacagttttccccccacaaaatagaagcattttatttagctaccaagaaatccaaagttgtggtggtaaaagtgagatattgaagctttcattgccagttaaagtattgttgagctcttcataattacttaaattggctgtaactgatgaacagagcaatttttttgttaggttgtagccagaattctgtacataaagtgggtctctttaaacattagtaaaaaaataggccaggtgcagtggctcacgcctgtaatcccagcactttgggaggcagaagtgggtggatcacaaggtcaagagttccagaacagcctggccaatatggtgaaaccccatctctactagaaatacaaaaattagccaggcatgatggctgtagtcccagctactcgggaggctgaggcaggagaatcacttgaacctcggaggcggaggttgcagtgagccgagatcgtgccattcactgcactccatcctgggcgacagagcgagactccatctaaaaaaatatatatatatatgtgtgtgtgtatatatatatgtatatatatgtgtgtatatatgtgtgtgtatatatgtatatatatgtgtgtatatatgtatatatgtgtgtgtatatacgtatgtatatatgtgtatatgtatacgtacatatatatgtatgtgtgtatatatacgtacgtatatatatgtgtgtgtatatatatacgtacgtatatatgtgtgtgtatatacgtatgtatatgtgtgtgtatatataagtacgtgtatatatgtgtgtatatatatacgtacatgtgtgtatatatgcatacgtgtatatatgtgtgtgtatatatacgtatgtgtatatgtgtgtgtatatatatacatacgtatatatacgtatgtatatgtatatatagtgacatcccacttatctggataatgtggttctagcaacctcatttcaacaaatatttcaattcctgttgtaagaccccatcacagaattagaggaaattcaaagatgattaaggcacagcctgtacctcttggtagttacggctttagtccactagaatgtttgtaaaattattctctgaagttcacatataactgtcacaaatcatatgcacttcagaattgcactctttgggccttcacccagagctttgttgagtcttatttattgtaacacataatgcttactcatagattttgataaatagaagagaggataggtgaagatggttaaaagaatgaatattgacagtaagagaaatgacagctggtagcctaatagtaaggcccaagagagaactaaaacgaacaaaactgcatttttgcctattacaaacgaaggtttttgaaatgttgatacttattcatcaagaaaataccaaattctagctgggcagagatcacacatgcctgtatagtcccagctacttgaggggctgaggcaggagaatagcttggctccaggactttgaggctgtggtgagctatgatatcaccactgcactccagcctgggcaatatagggataccccatctcttaaaacaaaaaacaagttctgtccaatcattgccataaaccagaaagatcacaagatctgactttgatgccaaatcaaaaaattgtttttactttgacctaattatgagaaactgttttggggtgataaacttaattgcttatatgcctgtggctagaaacactagaagtttctttacatttctcctagtatttaacatcttttttttttttaatttttgaggtgaagtcttgctctgttgtgcaggctagaatgcagtggtgcgatctctgctcactgcaacctctgcctcccaggttcaagtgattgccctgcctcagccccccgagtagctgggattacaggcgtgcaccaccatgcacggctaatttttgtattcttagtagagatggtgtttcaccacattggccaggctggtcttgaactcctgacctcaggtggtctgcccgccttggcctctcaaagtgctgggatgacaggcgtgagccaccgtgcctggccgtatttaacatcttcatatggagcctgaattttcctttttttcgattcctgtcagtagggtggaattttgtttgctagcatatcaagctcaatagaattctgctttcttgaagtgtgtgcctcacgaaatggctggaaagaagttaacaggtctaaaaatgaggttgaggacgtgggagactgtacacattggtggttttaggtgtgcatcgctgtgtaggtatgtcagactgaacaaccccattttcttgagatatatgacaaaatgccattctgtagtccactgttactgtctttcagggttttacttatgtggctccatctgtacttgaagtgtgaaagaaaagttttcctttgaaccaaaaatccgatcacctcgaagatttattggcagcccacgaacacctgtcaggtatgtcacactcttattttcactttttttttttttttacaacctacaagagtgtttacttaagaaatttatgccaagttacataaatgaaagactgtcatattctctttggttgacataagcacagcatctatatcttacattgcaaaggactagtctgactaatctatgatgttatatggtttaccttccctcctgaaagtaagcagccacactggcagatgtcttctttatccattcactcagcatttattgtgtaccaagagcaccagcactacatgctgcatgttatgtatgtgtgtatatatatgagtgtgtatatatatagtactataatacaggaattgtccctgtcctgatgaagcttacaatttagggggagagtcacaatagacaaaggatatacaaaaatacaattacaagtagtgctaagtgctatgatttaaaaggggaaagaaagaatgtagtggtagagagcagaggaaaaacaagggggcttctactcacagtggtcagagaaaggcctccctggtgtagtaacatctagcagtgaacagaaagagccagccctacaaaaataggaggtataagaatgttacaggcagaagaacagcaaatgcaaaagccctgagggaggagaaaagttgccttttcctggaaatgaaagggagatcaatgttcctggagtgtgtggtgagtgaagagacgggcagaggtttggaaaagtattttattttaaatgcaatagaaagctgttttgagcaggggagagtaaaatgatatatatactatgtatttaaatatatatatatctcattgagggttttgggggtcaggtgtagaggtaaagagaccagttaggaaattctagcagttaatataggcgggggagagatggttcaacttttgcctttgtgctaatccacatgaaaataaaattaaatgaaaataaatgtcatattacgccactccctttaaatgtaaaggaaatatgtctgttgagatgacccttaaacaaatgaatgacagctcttccttgtcttaaagcccaattttctcctggggatttctggggaagaggcgcttcggccagcacagcaaatcctcagacacctgtggaatacccaatggaaacaagtggcacagagcagatggatgtgacaacgagtggggaagcattggcaccacttccaatacgacagccgaactctgggccatacaaaaaacaagcttttcccatgatctccaaacggccagagcacctgcgtatgaatctatgccacagcaatgcttttaatgaatttaaggcaaaaaaggtggagaggccgatgtgtgagcatcctacagggtgaaacaagactcaaagtgacaatttcagagagtcagtgtcattacatagaacactttggacagaggaaaaataaacatggattttaaaaaaatcaatcaatcgtgcaaaaaaacttaaagcaaaatagtactgctgaacactcaggcacatcaattaattgtttcctcgtgacatcttctcaaccttatcaaggattttcatgttgatgactcgaaactgacagtattaagggtaggatgttgcttctgaatcactgttgagttctaactgtgtcgaagaagggttatcctttcattaggcaaagtacaaaattgcctataatacttgcaactaaggacaaattagcatgcaagcttggtcaaactttttccagcaacatggaatcaaagacaaaagaaacttaccaattgatgttttacgtgaacataacctgaatctttttttatataaatatatatttttcaagtagatttttgattcagctcattatgaaaaacatcccaaactttaaaatgcgaaattattagttggtgtgaagaaagccaaacaacttccgtttcttctcttggtgaaataataaaatgcaaatgaatcattgttaaccacatctgtggctcgttcgagggactggggtggacctggggtttattttcagtaacccagctgcaatactcgtctgtaatatgagaaaaaaaaagaatctatttaatcatttctacttgcagtactgctatgtgctaagcttaactggaagccttggaatgggcataagttgtatgtcctacatttcatcattgtcccgggcctgcattgcactggaaaaaaaatcgccacctgttcttacaccagtatttggttcaagacgccaaatgtgttcagcccatggctgaagaacaacagaagagagtcaggataaaaaatacatactgcggtcggcaaggtgagagagatagggatatccaggggaagagggtgttgctgtggcccactctctgtctaatctcttcacagcaaattggtaagattttcagttttatttctttctactgtttctactgtctaccttccttatatttttctcctcaacagttttaaaaagaaaaaaaggtctatttttttttctcctatactggggctacatttttttattgtaaaaatatttgatggccttttgatgaatgtcttccacagtaaataagaaaacttagtggcttcatttaggaaacatgttaacaggacactatgtttttgaaattataaccaaatctacataaatgatttacaggtacaaagaataaaagtaaaggtaactttaccttccttaaatatttcctgccttaaagagagcatttccatgactttagctagtgaaagggtttaatatctgcagagctttgtaaaaatatatttcagtgcatactggtataacagatgatcatgcagttgcagttgagttttaccacctctttttgtttgtcttttataatgtcttcagtctgagcatgcagtcaatctgtaatattttgcaaccctaggattttttcaaatagatcctttttgagccataggatccaagccataaaattctttatgcatgatgaattcagtcagaaaagagcaaggctttgctttttgaaattgcaactcaaatgagatgggatgaaatcctatgacagtaagcaaaaacagaaccatgaaaaatgattggaaatataccttttcaattgtggcaataattgaaagaatcgataaaagttcatctttggacagaaagccttttaaaaaaaatcactccctcttccccctcctcccttattgcagcagcctactgagaactttatgactgttgctggtaacttagaagctacaataataattaagggcagaaattatacttaaagtgtagatccttgttctctgacaatttgtgatgtctgaaaaaacagaacctgaaaagctatggtgacgtgtacaggcattatttcagactgtaaatggcttgtgatactcttgatacttgttttcaaatatgtttactaactgtagtgttgactgcctgaccaaattccagtgaaacttatacaccaaaatattcctcctaggtcctatttgctagtaacatgagcactgtgattggctggctataaccaccccagttaaaccattttgataattagtagtgccagcaatagtggcaaacgctgcaacttttctgcataaaaagcattaattgcacagctaccatccacacaaatacatagtttttctgacttcacatttattaagtgaaattaatttcccatgctgtggaaagtttattgagaacttgtttcataaatggatatccctactatgactgtgaaaacgtgtcaagtgtcacattagtgtcacagaaagcacacacccgtgcaatatgccttatctatctttatttgtaaaaatccaagcatagtttaaaatatgaagtcaatattaccagtcttcagtttctaagagggttctttatgattatactaagtgtataaaagagtttaagtgctttctttttcatcacttactttctttaaaatcagctattacaggattttttttattttatacatgctgttttttaagtaaaatataatcactgaattgaagtttactaatttgattttataaggtttgtagcattacagaataactaaactgggacttataaaccagctgtgattaacaatgtaaagtattaattattgaactttgaaccagatttttaggaaaattatgttctttttccccttttatggtcttaactaatttgaatccttcaagaaggatttttccatactattttttgagatagaagataatttgaggggaggggtggaggatgcatgtatgatactccaaaatgtcaacattctttactataggtaataagtgattataaacaagatgcattttagatagcattaatatattgagccttggattatatatttgatataggacctgttttgaatattcagttaatcatatggttcctagtttacaagaagagctagatctaagattattcccatgagaaatgttgaatttatgaagaatagattttgaggctttgaaaatggttaatttctcaaaaacatcaatgtccaaacatctaccttttttcataggagtagacactagcaagctggacaaactatcataaaagtatttgtcacacataacctgtggtctgttgttgattaatacagtactttttcttgtgtgattcttaacattatagcacaagtattatctcagtggattatctggaataacatctgaaagatgggttcgtgtatgtttgtgtttgcgctttaaattattgtttctcctatcccaagttggctttgcatctatcagtaaataaaactattcagctgcgttatcaggagtgctgtgcttttctgcttttcatcttgtatttagtttactgtattatttgattttggattgaatgaatgtaaatagaaattaaatgcaaatttgaatgaacataaaatagaagtgattttttttattatcctgataggaagaaattagtatacatatcaggtgtataaatggtttaaataatttattttcattaacatgtcagatgtgttcaagttgtcatataaataaactgtgtgtaaggaatgggttaaaagctgttctgctgagaaattgaagctatttaagtatataacaagttttagtattgatttttatgttagatgttacacatctttgtttttcaacttatagtcacgtagtagacatgaattatttacttaaaaaaatacatgtaacaacctatgtgaaaactagcctcataaaaaactctaggaagaccttcttgtgctaacaatcaacaatttgttcagccacacttggtcagctacatttgataatttggtatgtatgcacaaaataacgtagtgaactaatctgttttaactcatgtctcaatatatctagtgtgagctgggtattttgcatgaaccacttcttacctgtgaggtaattatatcacacttagcaaggggatttctctacagaagctctcaaactgactttaccttgctatacaacatagtagcgtatcaatactggtaaaacaatcttttagaagtcatgatctgaattcacagagtaaatgggtttctgaatctatattacctttttttgaggtgaaggaatagcgggatggaagaaatacttccagttcatcagcattgttattggatggcatagctccattagattttctcccttttcaatttataggtaaactgcattccaaaaaaaccccaccatgcacctccttggttctttaatcacattaagaaacagtgctgtctgaatagttacagggtaagcaaatgtattaaataggtattgtaatagggctgaagtaaaatgctattcttgtgtttgaacaggaagtcatcttggctatccttcacagccgaattgtaatcccaaactgcttttctcacccatcctctgctgtatacctaaataatacaactattagcatcaccacgaagccatttaaataatatttgtagtgggtctcaaagtagataatagagtgaaatatactgtaattgaatataattgtacttagaacctggtagtatttacctggagaaaaaaaggtacaggcttcctaatggtcgcttgtcaatttggatggccatacagtcatgaaagtgccttctatagccagttggtcagtatccttattaatccatgtgctggtttagcttttgtcttatcagtacagcaaatctgttttctacctctgcttcctaagttctcctttctaccaccttttcctcgactacaaactgatagatgcactctaaacttagatataaccagtagcagcccttcagacatgttttagatttcagattcctccttagaggtaacacggggagaaaagtgcttcattcccttttctagcaccctgcacaaatacctagaggcgaaaaaccacactatcaaaacctcatgaccacctctcagtgcaagctttaatcttccaattgatggtgagtcaagcataacattccaaaacttttatggagaagactataagggcaattcttttctaagattttagggcatctgtcttgaaactttttaatttttttttatatagagataggatgttgcccaggctggtcttgaactcctgggctcaagcagtcctcctgcctctgcctcccaaagttctgggattacaggcatgcgccaccatgcctggccatttgtcttgttttctgtactactcaaatcatcaagtaagccagctgtttataatccacatgaattattttaatagttacctcaagatactccatggtactacacaaaaagcatgatcatgaacattaaagctgatggcaggaagaatttatgaggtccacagacaaaatgaatttaaatcatttattttcactgattactagtcatactacagagaataatacaatattaaaatgtatcatcctcggtaaattaatcttcacttagaaaatctgttactgataaaatataacatttagaactttcatttaaaaatacaaattttatgaaaatattaagaatttttaggatgggaattaaaaagtcaatgctgaaagcagaattctacttttagatagtatgtatcttaaaatattatgaaaaatattctttattctgaaaacaatgctggaaagaatacctgagttctctaaaaccactagttctagtttcaaattgctgttttggtaatattaagaaaacacatttacaatttaacactgcagttacctgtcaaataattagaatagaatgttgcatatacattaggttgaacattatatatattttaaaacacagggtggtttcatttaatcttttggtgaattggaccgttaagtcttacattctaaaaccatctggaaacatttttctggtagccccgaaaatccattctgatgccttatcggtagtcattatgaccaaatgacattagtattttgtggccttaatagtttatacaacttaataattttgaaggtgtgatgaagtggctccatctttccatttgtttatatggtctgaaatcacagctctgcagagtggacatgttttctctctgttaaaccataaggtaatgcactcttcacaaaatatatgctgtaatgggctgggcgcggtggctcacgcctgtaatcccagcactttgggaggcggaggcgggcggatcacgaggtcaggaaatcgagaccatcctggctaacgtggtgaaaccccgtctctactaaaactacaaaaaaattagctgggcgtggtggtgggcgcctgtagtccaagctactcgggaggctgaggtaggagaatggcgtgaacccaggaggcggagcttgcagtgagccgagatcacgccactgcactccagcctgggcacagagcaagaccccatctcaaaaaaaaaaaaaaaaaaaaaaaaaaaaaaagccgggcacggtagctcacgcctgtaatcccagcactttgagaggccgaggcaggtggatcacgaggtcaggagatcgagaccatcctggctaacacagtgaaaccccatctctactaaaaatgcaaagaaacattagctgggcatggtggcgggcgcctgtggtcccagctacttgggaggctgaggcaggagaatggcatgaacccgggaggcagagcttgcagtgagccgagattgcgccactgcactccagcctgggcgacagagcaaggctccgtctcaaaaaaaaaaaaaaaaaattatacatatatatatatatatacacatatataattatatatatgctatgtatatgcatatatatatgctgtaatggaattaagaattaaattttatacttgataatcattttaagtccatcacactgtagggaatgaaagggattttttttttttttttttgagatggagactgaagacttgctctgtccacccaggccggagtgcaatggcgccatctcgactcactgcaacctccgccccccggggttcaagcgattctcctgcctaagcctcccaagttgccggggttacaggtgactgccactaccatgcccagctagtttttgtatttttagtagagacagggtttcaccgtgttggtcaggctggtcttgaactcccgacctcaggtgatgcacccacctcagcctcccaaagtgctgggattacaggcgtgagccactgcatccggcctgaaagggattttgaagagcactaatcccctcattttacaattgtgaaaatggagaacgtatgagacattcaagaagacaaagagcagtatgattggtagagccactagtgttctgactgtaccatccatttaaccataaaagcgatccttaggtgacacctttaagattaagtatgataacagcttaaagtctttgagttactagtaactgccataaagtataggaaagggccacaatccagtaacaaatgtcagtattgttctaaatgactagtatccaattataaaaattgcctgttttttaatcactttggtattcaatctgccagttgaattattttttccccattcatatactcctctgcataaaaatcatcagaacataagggacaaaacttagccaatccaccaatcccctgatcatgaataaattactagtatgtaccctgaatgctaccttacactaaacactagacttttttttttttttttgccttacaacaaacataaatgtgacttttgcaagtcacagagaagtgttgcatttaggtttttaaatttaaaaatataattacctgacagatgagaagaattggcttctgaaattcagcttgacatattgaacaagtaccatccacatctgaacactgtctcttgctggcagccactccataactctatgaagatagtaagttctgttaatctacaaatttctttctttcctattcctctaattacataagtgataccgtacttctccaatctccctggaaccaggcatttaaaaaccttcccaaaggatacaaacatttcaaagctgaaccacatatacagaaccacctctcgagtgcaccaagatgaaatcattaaataatacatcacaggattttggaagattgttagatctactagctttacaaaggatgatagtgcttcaaattcaacataactggcttaagagactaagcagtctgaaatgtaactattataaaatctatagccatgtattatttgacccaggactgccaaattgagctaacttattacctacagcagtggttcataaagtcgatccagccagagcttggctggctgaatgtaactcatgtggaaagcttgctttaaaaatagatttctctgttccacacaatattgattctgtaggaccagacatactgggatgtgacccagtaatctattatttgaaaggtctccaagtgagtgcaatatgaagaagacttagggaccactgaagagtgttctgccactaggtctaaaaattattattccaaattataaaaagcatttagtgctaaaaatgaatgataaagtgttacagagaaactgcaattgtaaatatcgcttgggtagaataactactgtcaaaacgaactgaacaaaaatgcaattatttgaattttcttctcttcgaatgtcctaataacaagtttctggtctctaagattttaacttcctcaccagattcagaacttaatcattaactagatgtgatgttaataaccctcagtgaaatttggagaaatcaaaatgttacaaatgaaaccttctttctgtagaaatgatggggaagaggcaactaaagagatgtaagaacacccaagttcagtcacggtcatgagggtaaagagttatctaaacttcttgtactaaaacgtctcaggctaacaacatcaaaatcaaagtaaaactcaaaggataaagatattaaaaattaaggttttttgagactggtgataaagatttcagaaacaagtcaggatactgttagatgatcttggtgtcaatttcccttcagtaaggtgtcatttagcaaagtacatttgcagataattatgctgacaagcttttaagacattactcatctggcatcttggagactccctctccagagagtaactgccatttccctggtaaaggagacttgaacaagtcaaagtattgatgactgatatcctctctatagtttgtctcagagaaagaatatcagggtattttcttgagagtattttggcacaaatcttacaagaccaattatagtaaaatggttgatgctcacataatcatcagttgaattgacttggacaaagctgaactctcagaattttattatgtcttgtctagtgaaagaagcttgcataggatgtagcaaagtttgtttctacattgctaactctatcttagggaaaagatgccctggctggttagtctggtttactttgtagacataatcctttttttatttttattttatattattcggttggcattcttttaagtcagtctccttgagccctgatgaaatgactgcaaagttgagaatcaaaccccgaaatctggtgaccacacgtaggtactgggaacctttcaggctactaaatagtaaattagggttctctatgacatcctttcactgcaatttgcaacatcaatagaatcacataataatgttataaatgacaccacagtctcaattaattgttaaatttcatgccatgaacttacttgtgcacataaaatcgagcaatggggaaatttgctccagtaagaaaacttcaagagacatgatttttggcaatgagctttctaaacatacaaaataaattacagtggaaggattttcacaggtgaataaggagttaataggaacacacaaagccccatttgtgaattaaaaaagaggaacaaaagttcataagatttttaagggtttataagtccttaaaaatgtcaaatggattgaaggggcaagaaacaagttcaaatatataagtactgcaacaattagcaggtggttgtcaatgtgtgattcaagaatctgatcatagagataaaactcctaaattattatagccccaagtgccaaagtactagaaaacagtcaaagtaaaagaaaaggatcatctatttatgaaatccattcttgtaaaactgctgaactaaaaaactttttgcaatgaagaaaggtgaaggtgtttttcttacctgataaaaagtacttaactggtcatgtaaaaaatattcgtaaaacctgtctgaaagttctcagatgcccaaaaaattccaaaagctgaaaagggaaataagagatcatttattaattcaaacagtcctatctgctaaacccaaaaaccaaagctgaaatcccataacatcaaatccttatattaacttaatgctcattatatgtcacaactaatcattttgtgctgaatattttattcaatttatagatttgagccatctcaatcaggctgaagtacatttaaatgcctagagtaacaatttgatcaagacaaatacaaatgtaactatgtcaaagtcaaagcaattttatctgattcacacgtttttaacatttacattttaaagtttcataaagtgattattaggttgaggggcgcaggcatggagagaacaggacaagatactctactagtttaagaattatgtatatgacagtgttactattgaggatgggtatgttctattccagttgttttccctacttagataatccatgctatgtgaaggtctactccccttccctccaatgaaaactgaaaccgctggattaagatagtctatttctgtttctctatttctaaataaatatagaacctgctattacttcaaactagtgatacaaagataaactataaaactgtgaaagaggaaaatagtagtatgtatcagtaatcattaatatgaatcatgcagtgacaagatttgtaatgttacctacttttagtacgaggtaaagtaaagccagcaatatcctaagactccgtctagttacattaccaaactccccatagcttataaggtagtgaaaccaaactagtatgggaacaaaagttcggtagtattgatacaattcttctaaaagcatataccagtaaccctaaaaaataaggaaaaagaaaacaaatagagctacccaaactacctaactacatagcacaaacaatactagactgagaacactgagtatatgatacaataatataaataactataaaattaatcttcataatgattacgactgaacctcaagctggttctcacatattacagtcactgagtgggctgctttgaaagaatttctaggctggatgcggtggctcccagcacttcaggaggttgaggcgggtggatcacctgaggtcaggagtttgagaccagcctggccaacatggtgaaaccccgtctctactaaaaatacaaaaattagctgggtttggtggtgggcacctgtaatcccagctacttgggaggctgaggcaggagaatagcttgaacccaggaggtggaggttgcaatgagccaagatcacaccactgcactccagcctgggcgacagagcgagacttggtctcaaaaaaaaaaaaaaaaaaaaaaaaagatatagtgaaaatgttttatgtatactgcaagtaaaacctatatatgtttttgctggttataaaaattttaaagtttttattgcatatgggaaaccactgaataattgtatatagtcaactgtcaattgataatgccctggacaacagaagtaccaatctaaatagtttcccatatatgatgtggggactgattttaaaattattctgaagcaaatataattctgattttatccaaataggttaatattcaggttcaagtgcttgaacaaatggttgccaggctgaaataatacagataattaaagctagttagcaaactgaaaaattgcaaaaggaggattcatttaaacaaagactaaatagcattaatgtgattagttaacatcactgcaataaagcataagttagtttcttaccttagatttaaaaggcatgatgaaagaaggcaccaataagataaggcattttaagctcatgaaaaagaatttcagaatgaagtctgtaattccaataatccaaagtacttcccagaagctcaaatggtccaaaataggatataaaaaaattcagccaccaaaagaaaatcatcaaaatttaccagagcaacatacaaaggtaaagtattaagaaagagttttaatttgctacaaatattttattttgatatgtaaaaaatatgaatttggcaggatgtcagagttcacattaatggaatggaggatcattttgcttattttaaagagatttttaaaatgtttggaatttagatcttcccttcatagaataaggaaaaagtcttcacagtttgtcatagttgacacctttctagcctgtaaacaaaaaaaaactcatcaataccagacatctcccatgtttttcttcaccaattccaatcaggattccatctcttcctttcagtgaattgcttgtcaagatcatcaactccctctgtatggctaaatttcaaggtcacttctctttttccgtcttccctccctgaataattttctttctagacttttaacacaacagtcgtctatttctcatatttcactgctgatttcttcttagtctcctttgctgtttctcttctaattgtggtcatgtcccgtactgggctctctatctgcactctctctttcctgggttagttttgtccagtcctgtgggttttttttttttttttttttgagacagagtcttgctctgtcacccaggctggagtgcagtggcacggtatcggctcactgcaagctctgcctcccgggttcatgccattctcctgcctcagcctcccgagtagctgggactacaggtgcccaccaccatgcccagctaatttttttgtatttttagtagagacggggtttcaccatgttagccaggatggtcttgataacctgacctcgtgattcacccaactcggcctcccaaagtgctgggattacaggcttgagccaccgcgcctggccccagtcctgtggtttttaaatatcaaccatgtgctcctgataccaaaatttatagccctaacctctaccctgagttcatgacatatatttggaaccactttcttaccaattctacttagcctctcaaacttaacatgttcaaaacaaaattattgatttttctccagttgcttagactaaaaacccagaggtcattcttgcttctctccacccacctacccaatccagtccatctgagggatactggctccacctccaaactatatcccagatttgcccatctctccaactccagtgaaatctggtcttctaatattctggtaaaagctgaagattcagaatactcccatttgacatggaaacttatcagctactgtcatttagtaagtgttcttactttcagaaaaaaagaccaacaataacaacctaatggtacttaaaaattatggaatatataaacaaaaactcaggtatcaaaaattaaatatttattgagcatctgctatgtgccaaagcactggggatacaaaatctgaataagttacgtaaagctcttgcttatgaggccgggtgcagtggctcacacctgtaatcccagaactttgggaggtcaaggcaggtggatcatgaggtcaggacttcaagaccagtctgaccaacatggtgaaaccccatttctactaaaaatacaaaaatttgccaggtgtgcacctgtaatcccagctactcaggaggcttagatgggagaattgcttgaacccgagaggcagaggttgcagacagccaagatcgagacactgcactccatgctgggcgacagagtgagactccatgtcaaaaaaaaaaaaaaaaaaaaagctctcgcttatgaaaggagacagttaaaaactgaactgattgaatacaataagtactatgtgaagtaaggtacaaagtgctatgaaacatgattacattaaaaatgtaattgtgtatttggacctctaattacctgtaataaagtgactgagaatgaaaggtgtaatataaaagaacagaagatcctgctaagaataccagtaaccaagcacactgaatctttgaggacctttcctgaaaggtaaacaattttataatgttactttgattttgccagaattttaaatatcattaaactgttttactttaatgactattaacttagaacatttttctaaatcttaatatagaatatctgttaaactgtacataatcatcagttactttgttttatacaactttagtgaccaaacagaactattatattaaacaaatgtttaaaacacaagtttcttcaccgtatgaaaaacattacctatgtttcaaagaagccaaatcttctctcaaaaaaaaaaaaaaaacaagaaaattaaattaaaaaaaaaaaaaaaagccaggtcctctacaagctgacataaaggactcacccaggacgggcgcagtggctcacacctgcaatcccagcactttgggaggccgaggtcggcggatcgcttgaggtcaggagtttgtgaccagcctacccaacatggtgaaacccatctctactaaaaaaaaatacaaaagttagccaggtgccatggcacgcgcatatgataccagctacccaggaggctgaggcatgagaatcgcttgaacgcaggaggcagaggttgtagtgagccaagatcacgccactgcactccagcctgggcgacagagcgaaactccatctcagaaaaaaaatggacccacccacaaaagaaaatttcaaaatgcattttaaccttgactcgtcaaggtttatatttttaaaattctcagattataacaatttaataaattaatctgttttaatcttactttttttttaatatggcttcttgacacattgcccagaactcctaggctcaagccttcttcccaactcagcttcccaagtaattgtaatctctttttttttttttttttttttgtgacacagggtctcactctttcacccagactggagtgcagtggcatgatcacaactcactgcagccctgaccacctgggctcaggcaatcctcccacctcagcctcctagataacagagattacaggcatgtgccaccacgcccactaattttttgattttttgtagagatggggttttgccatgttgtccaggctggtcttcaattcctaggctcaagcaatctgcccatctcagcctcccaaagtgctgcattacaggcatgagacactgtgccttgcctgtaatctcacttttaaagtcaagttaaatgaaaagttttactaattttaaatcattaagatttttctagtttgataggctgaactatagatttccaggtcagaatgcatgatactttacacagacatagccatttaaagttgccttaaggtgaaattttagaaactcatcctattttttcccaatgatttatatgactagggcttgagtaacttatggaaaaattccttgggtttaattttcttttctttttttttgagatgaggtctcactctgtcaccaggctggagtgcaatggcacgatcttggctcactgcaacctctgcctcctgggttcaagcaattcttctgcctcagcctcccaagtagctgggactacaggcaagcgccaccacgcacagctaatttttgtgtttttagtagagacggggtttcaccacattggccaggctggtctcaaacttctgacctcaggtgatccacccgcctgggtctcccaaagtgttgggattacaggcatgagccactgggcttggcacaggtctttcttttttcttttctttttttttttttttttttttttttttgagacggagtctcagtctgtatcccaggctggagtgcagtggtgcgatctcagctcactgcaacctccgcctcccaggttcaagcaattctcctgcctcagcctcctaagtagctgggaatataggcacgtgccaccacgcctgggtaattttttgtatttttagtagagatggggtttcaccgtgttagccaggatggtctcgatctcctgaccttgtgatctgcctgcctcggcctctcaaagtgctgggattacaggtgtgagccactatgtccggccactaaaagttgttaacgatgatgatattacttagtatcatcaaagtaactcatataacatgaagggacttgccaaatcagatcgaatagcgtgttctaactcttttaatcctttttactactttttctttaacagtaaccaatttttttttttcttacaaagaaggtaaggtgaaggaattcagcattaggagaaataatttattccaggatttagataacaaatttaatatatcatggaagttacaatatatcccattacttcctatttttttcaaaagttatttcctatttctctcaaaattatttgtctaaaatctatggagagaaacagttaataattttttagttgcttgttatacttgcttagaaaaacctgatttacagtgcttttgtttgcatacataaaagttgttagcagcccaattccaagagaaattcctgttagaaaataagttccagttaattgaaagaaaaaaaaatcaaagaggattatataagctaacaatgacacaaattaaaagtaaacatatacaataataaaagctaacaaaaaataagtaactgaatgcattaagtagactaccaataaagaaaattaactgattttcagaatgaaaacaagtcaatgttttattatgccctacctgttatatgctgcataacaagtttgacactcagaatcaaaatatgtggaagacttttttgcaaccacttgaagagctactaccgtgatctccagattctgcggcagtatcatcaggcagccttgcttcactgtgggagtgaccctgtaagtgactgtgtacccatccatgggcacagctatggacatctgaccttatatttctggagcttgtattttccgcacattctttagatatggcatttatctggatatgaacatctccagaatgaagacaagaaccttcttctgtcaatcttgtgtggacacagtgaggggctgaggcatcctcactgctttcagttcctggaggactgcgcagttggctacgattggcttgcgtggcccttaaatactttttctctgacccacatgtctttgcttcagggctctgtctcctaaaaaatcaaatagcagaaaatattctaagtaaacaggcagttaaataccggcaggatattcctccctgagtatcctttattcactaaaggagtagcaaataatcacagcagatgaattttcaggttatttatcactggactcctcccttctctcttactgccaaagctctgctgccctacacaaatgatcttttagggaacatctgctaccaaaaaaaaaaaaaagcggccaggagtttgagaccagcctggccaacatggcgaaaccctgtctctactgaaaatacaaaaatacaaaaatcagccgggcttggtggcgggtgcctgtaatcccagctactcgggaggctgaggcaggagaatctcttgaacctgggaggcggaagttgcagtgagctgaaatcgtgcctatgcactccagcctgggcgacagagagggatcccccgtctcaaaaaaaaaacgcattggctttcttttttggtgggggtggggtgggcagcggtggtggaaggcgtacttaagtctctctatgcttactaatttaaatctttctgacagatttctgggtcagtaagggtgagcgccaggctccagactatagtgaattttccgaggagatttgtgtaagtattctaacatttcaactatgtcgtggatttctttctttctctctctctctctctctctctttctttttttttttgagacggagtcttgctctgtcgcccaggctggagtgcagtggcgcgatctcggctcactgcaaactccgcctcccgggttcacccccttctcctgcctcagcctcccgagtagatgggactacaggcacctgccaccacgcccggctaatttttttgtatttttttagtagagacgaagtttcaccgtgttatccaggatggtctcgatctcctgacctcgtgatccgcccgcctcggcctcccaaagtgctgggattacaggcgtgagccactgcgcccggcagtcgtggatatttttaaacttaaaaatgtgtgaaaacttaggaaacaggaaaaagaaaaagaataccacataattcagccacagccacaatggagcacggtatgtattagtacactgataattttggtacgtttggtacatttgtaaatttagaataccaaatgtaatgtttaaattctcatcttggccagacactgtggttcattcctgtaatcctagcactttgggaggctgaggtgaaaagatcgcttgagcccaggaggtccagagcaccctgggcaacatacagagaacctgtctctagaaaaaaaatgttaaaattagccgggtatggtggcaagggcttgtagtcccagttactcaggaggctgaggtgggaggtcaaggctgcaaggagccattattgctgcagtctgggcgacagaatgaggtcctgtctcaaaaaaaaaaaaaaaaagattctccttttaacatactcaacactgaaggtatattagtccatactggatgtttattagtgcacctggagctgcatttcacccaagtaacttaactgaaatgtgacatatttgaagaaagaaagtactgaattgataagaagatttgacctggtgacaggctgttatctgataaattttctttccactggcatctggactgttggaaatagacattttaattttaattggttaattcaaaaagcatttgccacgtacttactgaatgttaagaatagtactagatgttggagagagagacataataatgggccaggcaccatggctcacacctgtaatctcagcactttgggaggccaaagtgggtagatcacttgaggtcagcagttcaagaccagcctggccaacatggtgaaactccatttctgctaaaaatataaaaattagggccgagcatggtggctcacgcctgtaatcccagcacttagggagggtgaggcaggtgtatcacctgaagtcaggagttcaagactggcctggccaacatggcggaacctcgtctctactaaaaatacaaaaattagccaggcatggtggcgcacgcctgtaaaccagctactcaggaggctgaggcaggagaattgcttgaaccccagaggcaaatgttgcagtgagccaatatcatgccactgcactccatcctgggtgacagagcaagaatccatctcaaaaaaaaaaaaatgtttccgtctcatggtgactgaaatggttagacctgcaaacaaataattacagtattttggagaaaacactatattgaaggttctgtgagatgcaatggaagcaaaaggtagaagcatttaactttgtcaggcaataaatcttgtattaaatttgtgatatttaagatgaaatcttaatttttttttttttttgagatggagttttgctctggtgcccaggctggagtagagcggcgcaatcttggctcactgcaacctctgcctcctgagttcaagtgattctagtgcctcagcatcctggatgaaatcttaagaataagttgatatttaccagggcacaagcagtaatagggcattgcagatagaaacattatatggaaaatggtggtattgaaataccatggtcatttaaggactgtttttcatatttggaagagtagggtgcatagagtagtaagagataagtcacataagtagaagctagaaaatgactttgtgggcctcacttagtagtttattctaaagggaagctactgagttttaagcaacagaattgtgtgactggatttcttttttcagaattcatatgctaatagtagcagtgcaagttccattaggagactattataagtagttcaggtacaagatgaggtcttgaacttgtcagtgaagtgggattcaagaagaaggagattggagaggttatgaaatagaatcaatagggttaagtgtcctagattgctgcagttaagctctgtggcccctccactacccacaccaatttttcacacctacccatgtccatacccttgggtagtctcctcacagactgatttaagtgatttgctttggcccttgggacaacagcaattgtaatgttagcagagacttgaaaaattcttccgcattgggattcacactcttactgctggtacccctttgccacaatttgattaaatcaagctagcctcctagaagatgagaccactttgagagtgtccctagctctcccagccttcctggttgtctcagcattctcagttgaagccccaaacatatgtgtgaggccatcctagaatgagccagtctatacctagaattataggaaatatagattcttttctttctttctttctttctttttttattagatggaatctcgttctgtcacccaggctggagtgcagtggcatgatcttggctcactgcaacctctgccttctgggttcaagctattctcctacctcagcctcccaagtagctgggactacaggtgcctgccaccatgcctggctaatttttgtgtttttagtagagacggggtttcaccatattagccaggctggtctccaactcctgaccttgtgatatgcctgccttggcctcccaaagtgctgggattacaggcatgagccactgcacccagcctatagattattttcttttcagcctctaggtttggagcagttggtttcataacaagattaactgatagcctaactgaccaagtatatagggcaggtaagaggaatagtctaagacaaatcttcattttttagcatggatagatggatacatcaatattgggaagctatattagaataagtaaattggtggcattaccagatgaatagggaatttttttgaaagaccaagtttggagagatatctgtaattttggcttggaaatactgagtcttaggagttcctgggaaacatacaggtgaagatacccagttggcaatgtgatataaggatctggagatggaaaatttgaagtaaaagctgtggctgtgaaaactttgcccatttctcatttatgcgttttcagagccttttttttttgtagattctttgtagacagtgttgtctacaaatagaaacagcttcttcctttctgatgcctattctttttatttcttgctttattgtattaactgtaactgccaatgtgatgttattaataaattaaataggaatggtgacagtagacatccgtgccatgctcctgattttaaggggaatacattcagcctttttaccattaagtatgtcagctgtaagttttgctcatttgtttgtttccttttttttttttgtgagacagagtctcactctgtcgtccaggctggagtgcagtggcgccttcccagctcactgcaaccttcgcccgcagggttctagcgattctcctgcctcagcctcctgagtagctgggattacaggcggctgccaccacgccctgctaatttttttgtatttttagtagagacggggtttctccatgttggccaggctggtctcaaactcctgacagagtggatccacccgccttggcctcccaaagtgctaggattacaggcgtgagccaccgcacctgggccgtttgtttcttttttttgagatggagtctcgctttgtcgcccaggctagagtgcattggtgtgatctcagctcactgcaatttccatctcccagtttcaagtgattctcctgccgcagcctccccagtagctgggattacaggtgtccgcaaccacacctggctaattttgtatttttagtagagatggggtttcaccatgttggccaggctggtctggaactcctgacctcaggtgatccgcctgccttggcctcccaaagtgctggaattacaagtgtgagccaccgtgcccagcctctagttttttttgtatgtgtcatctatcaggtcaagtaaataaattcccttcttctcctagtctgctaagaatttttatcataagtagatattgaattttgacaaatcttcttctgcctttattaaaaaatcacacaatttttcttatttagcctgttgatatggtgaaattttcttttctcttttttttggagacagagtctccctctgttggcccaggctggagtgagtggtgcgatcttggctcactgcaatctctgcctcccaggttcaagcgattctcatgcctcagcctcccaagtagctgggattacaggcatgtgccaccacgcctggctaatttttgtatttttagtagaggtggggtttcaccatgttggccaggctggtctcgaacttctgacctcaggtaatccacccacctcggcctcccaaaatgctgggattacaggcatgagccactgcacccagcctatcaattgatttttaaatgttaagccagccttgcatttcaaggataaaccccactgagttgtagtgtattaacctttttatatattgcattcattttactaatattttgtggaggattcttgcatccctgtttgtgggagatactggttttcttacaatatctttaactgttcttgatgtcaggataatgctggcctgaattggaaaatgtttcctgtttgcagaagaaattgtgttgaattggtatcatttcttacttaaattttggtagaatttgccagtgaggccatctggcctagaatttttttttatggaaaggttttaaactacaaatttcagtttctgcattcactatagaattattcaggttatatacttcttcttaagtcagcttgaaggaattggcataaagttgttcataatattctcttattagccttttaacatctgtaggctctgtattgacattagcacttttattgctggtattggtaatctgtgtaatctttgtttttttcttggtcagtatagctaaaagtttatccattttattggtattttcaatacaatttcatttcatttatttggttttatttattttctaatataagcatatcattactttaatttaatttgattaatttattttgagacagagtcttgctctgtcacccacactggagtgcagtggtgcagtctggggctcactgcagccttgaactcccaagctcaagtgatcctccctcttcagcctcccaagtttctgggactacatgtgcacactgccacacccagctaagttctaaaattttctgtagggataggatgtcactatgttgcccaggctgatcttgagctcttgggctcaagcaatcctcctgccttgatctcccaaagtgccgggattacaggcatgagtcaccacactcagccaagtatataattttatatatgatcctcccacctcggcctctcaaagtgccaaagtgccaaactgctgggattacagatgtgagctacagtgccgggcaccttcggtattttctgttagtgcaggtttgctgccaatgaattgtcttagttttccttcatttgagaatatctttagttttcccttcattaatgaaggatattttcattggtatctaattctgagtagacagtttgttttagcaaattaaagatattcctggctgggcgtagtggctcatgcctgtaaccccagcaatttgggaggccgaggtgggtggatcacttgaggtcaggaattctagaccagcctggccaacatggtgaaactccatctctactaaaaataagaaaattagccgggcatggtggcatgcgcctgtaatctcagctactctggaggcagaggtgggagaattgctggaacccaggatgcagtgagccgggatcacgccactgcacttcagcctggacgacagaacgagactccatctcaattaaaaaaaaaaaaaagatattccactgtttctactcttcagggtttctaataagaaatccacagtcaaatcattgttcccctataggtaatgtatttttttctttctttttctttttgagacggagtcttgctctgttgcccaggcttgagtgcagtggcggtgatctcggctcactgaaagctgtgcttcccgggttcacgcaattcttctgcctcagcctcccgagtagctgggactacaggcgcccgccaccatgcctggctaatattttgtatttttagtagagacagggtttcaccatgttagccaggatggtctcggtctcatcacctcgtgatccacccacgtcggcctcccaaagtgctgggattacaggtgtgagccatggtgccccgcctttttttttttttttttttttttttttttcctgagacagagtcttgctctgttccccaggttggagtgcaatggcgcaatctcagctcactgcaacctctgcctcctgggttcacgtgactcctctgcctcagcctcctgagcagctgggaccacaggcatgtgccaccatgcctggctaattttcgtatttttaatagagatggagtttcaccatattggccaggcttgtctcaaactcctgaccttgtgatctgcctgccttgtcctcccaaagtgctgggattacacaggcgtgagccaccacgcccggcctatgtaatgtatttttttctgcaggtatctctctctgttgtagtaggctgaataaatagccacccaaagatgtcaagttttaattcctgaaactcataaatattattttatttggaaaaagagtctttgctgatgtaattaaggattttgagaggagtcagttaccttggatttttcaggtgggtcctgaataccatcccaagtgtccttataagagagaggcaatagagacacagaggagaaagccatgcgaagatggagcagagagatatatggccttaagccaaggaatgctgatagctgccagaagctggaagaaggcaaggaatggattatcccctatagcctccagaggcaatgcagccctgccaacactttaattttagatttctggcctatagaactgtgaaagaataaatttctgttgttttcagctactaagtttgtgatcatttggtgcagcatttacaggaaacgaatacacctctccttctagggctccaattatgtgaatattagaccatctaatattgccccacatgttcctgaggctctctgttcattttcttttaaatctgtttttctctgttcttcagattggacaatttctctctgtctttttttgttgtttgtttgttttttgagatggagtttcgctcttgtcgcccaggctggagtgcaacggtgcaatcttggctcattgcaacctccgcctcccacgttcaagtgattctcctgcctcagcctctgagtagctgggattacaggcacccaccaccatgcccggctaatttttgtatttttagtagagacggggtttcactatgttggccaggctggtctcaaactcctgacctcaggtgatccacccaccttggcctcccaaattacaggtgtgagccaccatgcctggcctggacaatttctcttgatccaccttcactaactctttcctctattggtaatctttatcctattattgataccatctagtgaaattttttatttcggatatattttttcagttgtaaactttctgtttggttctttttcatagtttttttcttctgttgagaacttatatcttaccatgttcacttttatcttatagagcatgatgataatagctttcttaaagtctttgataattccatcatcttggcatttgtatctgttgattatctttttcgcttgagaatggtcactttttcatgactctttgtatgttgtataataccagtttgtatcctgaacagtttgaatattcctttgtgactctctgggtcctattaaagtctccagagaatgctgattttagttgctgttttcagcattcagtcatcctggttggattgagactgcaaggtctgtcttgcccgtttttctccctgtggattccaatgtcaagacagttttcaaagcctgtcctgtgctgctttagatcatcctacatgtatctgtgccctttgggggttagacttggacttgtgccttatgttgttcttcggttttcgaggcttttgctgtgctgctttgtggtattctgtgtatatgcacctcaggaatgagccctggacagatgcttattcgtgcacagaagtaggaaaacccttctctaggtctcctctctgggattcttctcaactttctgcctctgtcctagagccagaatgatggggcttctcaaggagggttagttgcccatgccactgccacagcaagagagacagggaaaaaatggacatttctcccttacagctctgaaacccagggactcattttctgagttccttgatctacacagacagggcttctctgggagttttagctgtccacactgcactgccacagctcactgtagcctatcctcagatcacacacacacacacacacacacacacacacacacacacacggaaactcactcccatgtgggcccctttctacaagtttgactctgcatttgtttacttttcagagtgcacagggagttgctttttgtatttattccagagtgtttagttataaccagcaatagaaataacctatagtggactactccatcttgactggcactggagtcttaaaatgttaataattctttctcttttttttttcttttttttgagacagggtcccactcttttgcccaggctgcaatgcagtggcactgtcactgcagcctcaatctcccaggctcaagtgatcctctagcttcagcctcctgagtagctgagactacaggtgcacactactgcatccactaatttatttttatttttagttcttttttttttgagacggaattttgctcttgttgcccaggttagagtgcaatgctgtgatcttggctcactgcaacctctgactcctgggttcaagccgttctcctgcctcagccccccaagtagctgggattacaggcccctgccaccatgcctggctaattttttgtatttttagtacagacagggtttcaccatgctggccaggctggtcttgaactcctgacctcaagtgatccatcagcctcagcctcccaaagtgctgggattacaggcgtgagccactgtgcctggcccactaatttattttttatagagatggggtcttgctttgttgcccaggctgctcttgaactcctggcctaaagctatcccctcatcttggcctcccaaaatgttaggattacaggtgtgagccaccacatccagcttatttcttaaatgagtgattaaatgtgtgtctctttcactatactgaatgtcagcagggacaattttgattttgtttgttttattttgttttgttgcattgcattgcattgcatacggtgtctcactctgtctccttggctggagtgcagtggcgtgatctcggctcactgcaatctccacctccttggttcaagtgattctcctgcctcagcctcccgaatagctggggttacaggtgtgtgccaccacgccaagctaatttttgtatttttagtaaagacgaggtttctctacgttggccaggctggtctcaaactcctggcctcaagtgatccacccgcctcggcctcccaaaagtgctgggattacaggcatgagccattgcacccggcctattttattttattttttaaacatattttattttatttttaaacatattttatttacttatttttttttgagacaagagtcttgctctgtcacccaggctggagtgcaatggtgtgatctcagctcactgcaacctccacctcccgggttcaagcaattctcccacctcaccctccctagtggctgggattacaggcacctaccatcatgccctgcaaatttttttatttttgtagagacggggtttcaccatgttggccaggctggtcttgaactcctgacctcaggtgatcctcctgcctcagcctcccaaagtgctgggattacaggcatgagccaccgagcccagctttacttttatttttatgtttttgagatggagtctcactttgtcacccaggctggagtgcagtggcgtgattttggctcactgcaacctctgcctcctgggttcaagtgattcttctgtctcagcttcccaagtagctgggattacgggcatgtgccaccactcctggctaagttttctatttttagtagagacgggcttttgctatgttggtcaggctggtctcaactcctaacgtcaggtgatctgcccacctcagtctcccaaagtgctaggattacacgcatgagccactgcgcttggcctggctttgtttattactgtacctaatgcctaataccatttttggcatatactaagtggccaataaatacttatggaataaacaaatgaatggacactttttaaacctcatcctgcttgacatttttgcagcattctacactataggttgttcccacctcctggaatctttcttccctaaactttcatattctactgatttccccacttctgcaggctttctttacaggcaagctgctacttctttatgaatcttacagcttcagatattgctgtgaaaatggggacacctacatagtcacccacatcggcacaagtacagacttagagaataataaatgctcagtcaccatttcctcatctgagaagagagtggatacagtcatcccttagtatctctgggaattggttccaggaccccatgtggacaccaaaatccatggatgctcaggtccctaatatacaatgatgtagtatttgcatataatctatgcacatccatatgctttaaatcagattacttaaaatacttaataaaatgcaattgctatataaatagtaattatacattattacttagggaataataaggaaaaaaagtctatacatgtttagttcagacacacccatccttttttccctcccaattttttttttttttttgaggtggattttcactctgtcacacagagtgtgacctctgcctcctgggttcaggggattctcctgcctcagcctcccgagtagctgcgattacaggtgtgtgccaccatgcccggctaatttttgtatttttagtagagacagggtttcactatattggccaggctggtctcgaactcctgacctcaagtgatctgcccaccttggcctcccaaagtgagccaccatgcccagcctgcccctaaatattttcagtccttggttggctgaatccacagatgcagaaaccacagatgtggaacccatggatgcaaagggctatttgtggcccggtgcagtggctcacacctgtaatcccaacactttgggaagccacggtgggaggatcggttgagcttagaagtttgagagtagtctgggcaacatggtaaaagcccgtctctactaaaaatacaaaaattagcagggcgttgtggcatgcatctgtggtcccagctaatcaggaggctgaggcatgagaatcacatgaatccaggaggtggaggttgcagtgagccgagagtgcatcactgcactccagcctgggcaacagagtgagaccctgtctcaaacaaaacaaaacaccaacaggctgagcgtgggggctcacacctgtaatcccaacactttgggaggccaaggcaggcgaaccacttgaacctaggagtttgagaccagcctggccaacatgtcgaaaccccatctctactaaaaaaaaaaaaacaaaaaacaaaattagctaggtatcgtggcaggcacctgtaatcccagttactcaggaggctgaggcaggagaatcgcttgaaccagggaggcggaggttgcagtgagccgaggtcgtgccactgcactccagcctgggcaacagagcaagactctgtctcaaaaacaaacaaacaaacaaaaaaaaaaccaaacccccaatgggctatgtgttgactgcatggtggctctctttgttgttctcctgttgcctattgttattgaatccaaagtcttctaggtcctctttttacctgcttcttagctaatcattatattcctacacaaattcttgttaagataaaattttcataagttaaaaacttgtctcttacgtaaatataaacagaaaataagtcaggccaggtgcgatgactcacgtctgtaatcccagcactttgggagcccaaggccagaggatctgtagagtccaggagtttgagaccaccctggccaacacggttaaactcctgtctctactaaaaatacaaaaattagccgggcatggtggtacacgcctgtaatctcagctacttgggaagctgaagcaggaggatcacttgaaccggggaggcggaggttgcagtgagctaagatcgcaccactgcacttcagcctgggcagcagagcaagactccctctcaaaaaaaaaaaaatcaaattatgatgcacacgcctacataatcagataattcccagagggtctaaacagcatcctgcattccatggaaaagactcagtgatctcttctgctcatttccaaattttggatattattttcttaatattatttttaacttttattatcattatcattattattattgctttgagacagggtcttactctgttgcccaggctggagtgcagtggcatgatcatggctcactgcagactcaacctccagggctcaagtgatcctcccacctcagcctcccaagtagctgggaccacaggcgtgcaccaccatgcctggctaatttttttatttttttgtagctcggggtctccttgtgttgcccaggctggtctcaaactcctgggctcaagtgatcctcctgcctcggcctcccaaagttctaggactacaggcaggagccacagcacctggccagttttcataatatgcttcacccagatagaaaaattttactttctctttttctttgtaccggtctccctctttcctcatagaatgttttttcctctcttcctgcccaggtatgtcccttactttctttacatctggccccagcttgcttccttttaacacaaatttctgtttccttcctctttcatccttacatgaaacagctgatggcccaggtattcattcttgaaacattcaaggagtaatttggagtgttaattttcttttctttttcttttctttttttttttttttttgagatggagtctcgctctgttgcccaggctggagtgcagtggcatgatctctgctcactgcaacctctgcctcccggattgaagcgattctcctgcctcagcctctcaagtagctgggattacaggtgcctggcactatgcctggctaatttttgtatttttggtagagacggggttgcatcatgttggccagcctggtcttcaactcctgacctcgtgatccacccgtctcggcctcccaaagtggtgggattacaggtgtgagccaccgcgcccggcctggagtgttaatttttcatttaggagatgataaaatggtattatttttattaaaaacggccttcattagtttgtattttttttcccccagttctcatttggtttaaatggtttggcatacttgtgttatattcccagtttcattttaacttccatgaggggagaaaataaatttttggtttttttagacggagttttcacttttgtcgcccaggctggagtgcagtgatgcaatcctggctcactgcaacctcggccttctgggttcaagcaattctccctgcgccagcctcccgtgtagctgggattacaggtgcctgccatcacacttggctaatttttgtatttttcgtagagacggggtttcaccacgttggccaggttggtctcaaactcctgacctcaagtgatctgcccacctcagcctcttaaagtgctgggataacaggcgtgagccacctcgcccagcccaaaatacaattactcttttttttttttaaatagaaagtgtatcctctaattcagccatggtatatagcacttatgctaccactgtgcttacccatagctatggtagatacaattgataccagagtcactctggattagcctggactcagcctcatattccttctcaacacagaattccaggcacccactctcagtcaattaaagttggcacaagatggacatgttttattaaaaactgagtgttttaaagaaatacgtcactcaggtgtggtagctcccacctgtaatcccagcactttggaggctgaggcaggagaatcgcttgagcccaggagttcaagaccagcctgggcaacatggcaaaatcctgtcctctacaagaaattttacagttagccaggcatggtggcatgtgcctgtattccagctactcaggaggctgaggtgggaggatcacctgagcccaggaggttgaggctgcagtgaattgagatcgtaccactgagctccagcctgagtgacagagatcctgtctcaagaaaaaataaataaataaaaagtataaaaagaaagtggtgcttaagtaagaccaatcaaaaattattgtatgggctcattcatgtatatgtgagtatagggagacaattgtggtctctctcccaaaataaaaatgtcttttgggaattgttctaaaataatttgtcgtatggggttgattataatctcacgaagtatgtttcctttgtttttttttttagacagggtcttcctgcatttgcaggctggagtgtagtggcataatcatggttcactgcaacttctgcctcttgggcccaagcaatctcccatctcagccttcctagcagctgggtccacaggcacacaccaccacgcctggctaactttaaaattttttatagagacggagtcagcctaggctgattggtgacggcccaggttggtcttgaactcctgggctcaagtgatcttcccacctcagcctctcaaagttatgggattaggggagttaaccacggagtccagcctctttttttttttcttttttcccccccaaatccaagcaaattattaaggtagatacatttcttatataaaaattaatttacatcatgtgacccagtggttggaccttctggaaaataaagacccattttcagtacattgttttgaatgtatccacatttgatcctaaagtaacgtactttatttttttgaaattattattattattgttttttaaaaagacatttatggctgggtgcagtggctcacacctgtaatcccagcactttgggaggccgaagcaggcggatcaccaggtcaggagttcaagagcagcctggccaatatggtgaaacaccatctctactaaaaatacaaaaattggctgggcatggtggtgtgcccctgtagtcccagctactcggtaggctgaggcagaagaatcgcttgaacccaggagggagaggttgcagtgagccgagatcgcagcactgtactccagcctagcaacagagcaagactccatctgaaaacaaaacaaaaaatctcttaggtgatgttcttcagtgtcttctttagtgccaccaacaaatatctttttcacagttaagtgggcacctggtcttcgagaatcttctcttgagacagttctctttgtttccacaactcttccatccaccctgtgtggccttgcattcatggctgcatccacctcccccacagtggcatagtgacaaacgcacagcccctggagcactaggtgtttggatgtctcatgaccacacagtccgtgagcgttcccattgctcagagtggctcctcaggctctcatcagttgtttcaaagctcaaccgtccaacgaagagcttcctcagttgttcaggctctttaggagactctgacttatacatgacggcagggagaagagagactttaatgatgcttcctcggcagtgtccatgggcagaaagctattttttatttttttgagatggagtctcagtctgtcatccaggctggagtggagtggcgccatctcaactcactgcaacctccgcctcctgggttcaagcgattctcctgcctcagcctcccgcgtagctgggactacaggcatgcgccaccacgcccagctaatttttgtatttttagtagagatggtgtttcaccatactggccaggctggtctcaaattcctgacctcaggtgatccacctgcctcagcctcccaaagtgctgggattacaggcgtgagccactgtgcccaaccagtaatgtactttagattgacaaattgtttggaatcccagaatcagtcattaaatctagagagttttgtcacagatcaaagagggtaccaaaacaaattagtcaccccttttcttgcagaagaagtttataataagctttagatgtaccttatgtccaaaggaagcacttggtgttttacacagtgtagtatcaaaacacggataaggagacagaatttattggcttaatgttctctttagagctcttgatattcatgtagcataattattaaaaacatggactccaatgccaaacatccttcagtttagcttggagagactatttaaccttgcactgtctcagtgtcctcatcttaatggggttgtggtgaagaccttttatttacttatataactgtgaggaatgtacacattcatatgcacatacatgtatttatgtatgtatatacgaaactgaccccatagtcccatagaagttttttgggataaatatagaaattgactcttcttgtgctggcttagtcagcacatatactaaaattggaacaacaacagaaaaagaaactgacctggtcttaaatttgaaacttacatttgttttattttattttatttatctatttaacttttttgagatggagtctcatctgtcgcccaggctggagtacagtggcgtcaccttggctgactgcaacctctggctcccaggttcaagtgattctcctgcctcagcctcccgaatagctgggactacaggtgtgcatcaccacgtccagctaatttttttttttacttttttttaagtagagacagggtttcactatgttggccaggctggtcttgaactcctgacctcaggagatccacctgcctcagcctcccaaggtgttgggtttataggcgtgagccaccatgcctggccacatttgttttatctgagttctttcctcaaaaaactacctttaggtctctcaaaaacattatcaaagaactgaaactaaccaggtcaccacatccagacaatgagattcggggacccctcattcatcatgattgctgccttgctcctccctagttcttgttctcttttttttttcttttttttcttttttttttttcagatggagtctgaaaaaaactcttgttgctcaggctagggtgcaatggtgcgatttcagctcactgcaacctccacctcccgggttcaagcaattctcctgcctcagcctcccaagtagctgggattacaggcactaccacatccagctaatttttgtatttttagtaaagacagggtttcactatgttggccaggctagtcttgaactcctgacctcaggtgatgggcctgccttggcctcccaaagtgctgagattacaggcatgagccaccgtgcccagcctctcgttttcttatacattgttacatttcttttctgctacataaacccctagttacagtcagtcagggagttggatttgagactaagctcccaattcctctactgcagcacccagttaaagccttcttccttggcagtaattgtggtttcagtgtttggctttctgtgcagagagcagcaggacgtagactgaacccctggtgtttcggtaacacatacactctcatgcagagcacttagaatagtctaaggacatggaaagcactatacatgttaattatgacttatctttacaaatcaacctcaatattgtcctggcacagtaactcacgcctgtaatcccagcactttgggaggctgaggtgggtggatcacttgcggccaggagtttgagaccagcctggccaacatggtgaaaacctgtctctaataaaaatacaaaaattagctgggcctggtggcgggtgcctataatcccagctacttgggaggctgagacaggagaatcaaccgctgcctgggaagcagaggttgcaatgagccgagatcgctccactgcactccatcctgggtgacagaacgaggcttcatttcaaaaacaaacaaacaaacaaacaaatcaaccttaatagcattccttaaatacttacaagttctggttcatggatcttttatcatgaaagagtattacaatttattttaaatgtttatttcataattacataaattttttgtttctttttgtaaataggtttcttgacctataaaaagagctgtttgctcaagagaagaaacttccggccagacacagtggctcatgcctgtaatctcagcattttgggaggccaaggtaggcagatcacctgaggtcaggagtttgagactagcttggccaatatggctaaaccctgtctctactaaaaatacaaaattagctaggcatggtggtgcgtgcctgtaatcccagctacttgggaggctgaggcaggagaatcgcttgaacctgagaggtggaggttgcagtgagccaaggctgtgccactgcactccatcctgggcaacagagggagactcttgtctaaaaaaaaagagagaaaagaaaagaaacttccaattttccaatttgtttagatccaggaatagaccaatttgaaaaatcttaaataatattaactactcagtccatggtattcttcataaaatggctgtaagaggcagcaatactaagaaaaacatgaatttatgaacataagtactgctttttccccctcagtttgatttaaatttaatatcctcccacaatgggaaatgatttacaataaagagataaactggaaagaataagaaaatggaaaaagatgtcatttctttttactacccaacagatttaccatatgttttaaaatgatgcttggccatctacagtaaatgaaacaaaatgctttttaaaataatgtaacactttaaactatttttacgaccaaactctccctctcttgtgaaatatccatcttactaagcaaaggtttatttaagctccacttacatctatgttgtttttagctcatttcctttttaaaaaagcaatgggcaagtttatttcccagtttatctgttataataaaatataaaaagcatttctgttttggcctctagtatagcattatcgaaagctacgaaactcacagcaaaatataggacagtgtaaaattagaaactgctggtgtttctttagcagcagttgctgtccttgcagttgttttcccctcttgccaccagcacaaatctgaaagtcacctctgtgtaccagacaacaaaccccaagtgtgttgtttaaataacacactttattattcacatagcatagatttcacccttttaaagtacacagttcgctgggttttagtataatcacagagttgtgtaatcattaccattgtccatttagaacatttttttctctccaaaaaaaaaaacaaaaaaccccccaaaaactccataccctttagcattcattccccattccttcattcccccaggacctggcaatcactaatctacattctgtctctgtggacttgcctattccagacatttcatataagtggaatcacaattatgtgacctttgtgactggcttcttttgcttcttcttcttctcctttttttttttttttttcttttcttttagctacagggtctcactatgttgcccaggctagtttcaaactcctgggctcgaggtgccgttcaaggcccggccctccagttccgccgcggccaccgctgccgaggtgcgtgggcccggcggagtgccaggcctgcattctctcctccttcctccccgcctctggctgccagtaggacctttctctcgcagccgctgggaccccgtgtcatcgccaaggccgagcacgatgccctgcaaagagggaggtgatggaattaaaccacccccaatcattggaagatttggaacttcactgaaaattggtattggtggattgctaaatgttggaaaatctactttcttcgatgtattaaccagtagtcaggcttcagcagaaaacttcctatttggcaccattgatcctaatgagagcagggtacctgcgccagatgaaaggtttgactttctttgccagtaccacaaaccagcaagcaaaattcctgcctttctaaatatagtggatactgctggccttgtgaaaggagctcacaatgggcagggcctggggaatgctttttttctttttaatctcatattaatgcctgtgatggcatctttcatgtaacacgtacttttgaagatggtgatatgacgcatgttgaaggaagtgtagatcttattggagatacagaaataatacatgaagagcttcagcttaaagaggaggaaatgattgggtccattacagataaactagaaaaggtggctgtgagaggaggagataaaaaactaaaacctctttgggaggccgaggtgggcagatcaccaggtcaggagttcaagaccagcctggccaatatggtgaaaccccatctgtactaaaaatacaaaaattagctgggcatggtggtgcacgcctgtaatcccagctaatcgggaggctgaggcaggagaattgcttgaacctgggaggcggaggtggcagtgagctgagattgtgccactgcactccagcctgggcaagactccgtctcaaaaaaaaaaaaaagaaagaaagaaagaaagaaagaaaaacaaatggttgataaaaataaaaataaattaaatagtgggtggacaagtatgacctaggtgcctttgtcgttccttttagtggggccttggcaagaattgagtgctgaggagagaccggagtaactggaagcaaacacgactcaaagtgctttgccaaagatcattaaggctgggtctgcagcactccaactagaatacgttttcactgcaggcccagatgaagtgtgtgcagggaccatcaggaaagggactaagaatcctcaggctgcaggaaagattcacacaaattttgaaaagagattcattatggctgaagtaatgaaatacgaagattttaaatgggaaggttctgaaatgcagtcaaggctgccggaaagtacagacaacaaggcagaaattatattgttgaagatggagatattatcttcttcaaatttaacacacctcaacaaccgaagaagaaagataatgcatgttttacagtactccagatgtctacacccaacaaaacatctggaaaaacaacaacaacaacaacaacaaactcctgggctcaagcaatcctcctgcctcggcctcccaaagtgctgggattacaggcatgagccgccatgcccagccagcttttttcacttagcttaatgctttcaaggtttattcatgttgcagaacgtatcagtacttcattcctttttatggtcaaataatattccattgtacggatataccacagtttgtttaatcattcaccagatgatggacatttaggttgttcttgtgttgattattatgaacaatgctgttattaacatttatgtacaagtttttatgtggatatatgtttttatttttcatgagtatatgtacaaagaatgaagttgctgggtcatatgataaccttttgaggaactgctagactattttccaaagtggctgcaccatttagcattcccagttgcagtgcattagagtaccgatttctccacgttctaacctttgttatctatctttttgattatagccattctagctggaatgatgtggtatctcattttgattttgatttgcatttctctgatggctaatgacattgagcatcttttcatgtgcccattgtccatttgcatatcttctttggaaaaatttcttttcagatgcatttttttaaaaaaacaattatgggttttatcttaatatggtgtcgtaagttttttagaatatattctgaatataagtctcataacagatatatgatttgcaaatattttctctcattctgtgggtacttgagctttcttgatggtattttttgaagcactaaaattttcagttttcatgaattccagtttatctgtttatctttggttgcttatgcttttaatgttgtatctaagaaagcattctgtaacccaagaaaatttactttggggggtcatggtggttcacacctgtaatctcagcacttttgggaggttgagacttgagaccaggagttgaagattagcttgggaaaaatagtgagaccctgtctcaaaaaaaaaaaacaaaactaaaaagtagccagacatggtggcatatttctgtggtcccagctactcaggaggctgaaatgggaggattgctcgagcccaggaggtggaggctatagtgaaccatgttcacacctctgcactccagcctgggtgacagagtgggaccctgtctccaaaaatacataaatatataaaaatttttaatttacttatatattttttccataagttgtacagtttcaattcttacattttgagctaattttttatgtatggtgtgacataggagtccaaattaatttttttgcaattcacttgtcccagcgccatatattgaaaggctctttgtcactgaatttcctcggcatctttgtcaaaaatcagttgaccatgaatgtaagggtttatttctgggctttaattctattgcattgatctgtatgaatgttgaatgttcttataccagtaccacactgtcttgattgctgtagctttgtgcttgatatggttaggcttggtgtccccacccaaatcttatcttgaagtgtaatccccataatcactataatccccatgtgtcaagggagagaccaggtggaggtaattgaatcgtggaggcagttccccatgctgttctcatgacagtgagttctcataagatctgattgttttataaggggctctttcccctttctcttggcgctgcttcttgctgccttgtgaagaaggtgccttgcttccccttcaccttgattgtaagtttcctgaggcctccccagccatgctgaactgtgagtcaattaaacctcttttctttataaattgcctagtctcagaaagttatttatagcagtatgaaaccggactaatacagtgctgttttgaaatcaggaagtgcccatccttcaactttgttctttctcaaggttgttttggctattttgtgtcccttgtatttctttcactatttttcttccttttgtagttttaactgaccattttatatgacttcattttttctctccttttaattttttctatttttttcttagcatattcattgtgcttctttttttttactttttaacaacttttttcagtggttgctctaggttccctttattttttttattttttttgtattttttagagacgtggtctcactgtgatacccaggctggagtgcagaggtgtgaacatggttcactgcagcctctacttcctgggctcaagcaatcctcccacctcagcctcccagataggtgggattacaggcacaagccaccacaccactctaattttgtcgtagtagtttttggtagagagtctcaccgtgttgcccagtctggtcccaaattcctggcctcaagcaattctcccgcctcagtttcccaaagtgttgggattacagacatgagccaccatgcctggccaactcttgtattttaatctgaattttagaatcagcttgacaacttctgcaagaaagaaaactggggttttgataggattgccttgaggctgggcatggtggcttatgcctgtaatcctagcacttttggagggcgaggtgggcggatcatctgaggtcagaagttcgagaccaccctgggcaacatggtgaaactccgtcattactaaaaatgcaaaaattagctggatgatgtggcacacacctgtaatcccagctactggggcggctaaggcactagaatcgcttgaacccaggaggcggaggttgcagtgggcctagatggcgccactgcactccagcctgggagacagagcgagactccatctcaggaaaaaaaaaagatatcacactgtaccccataagtaagtgcaattattatgtgtcaaaaataaaaaattatataagaactaataaacaagtacaccaatgttgtagggtacaagatcaataaatgaaaaccaatcatatttctggccgggcatggtggctgggctcagtggcacaagcccaggagtttgagaccagcctggccagcatggtgaaaccctgtctctactaaaactacaaaaattagccgggcgtggtggctcatgttgtaatctcagctactcaggaggctgaggcatgagaatcacttgaccctgggaggtggaggttgcagtgagccaaggtcacgccactgcactccagcctgggcaatggagtgagactctgtctcaaaaaaaaaaaaaaaaaaaaaaaaaaaagtccatgtagtacatgtatcaaaacatcacaccgaggctggctgcagtggctcacgcctgtaatcctagcactttgggaggccgaggcaggtggatcacttgaggtcaggagtcaaagaccagcctggtcaacacagtgaaaccccgtctctactgggaaaaaaaaaaaaaaaaaaaaaaaaaaggaagaagaagaagttggcagcatggggagggggaggaacaagtggggagtggtgctgttgttaaaaaaaatactggtctgcttcaacccaaggggaatcagaagatcaaaagcagtttgggaaagccagaaccgtcagggatggagggagaaggaaaatccagggggtggggggttctgtttggcaactggggtgaagggattgctttctccctgctgggattctccccaacccttccggtcaggcaggaagggagcagcctatttcactgcaggcccagatgaagtgcgtgcatggaccatccttgaactcctgggtgcaagggttccttctgcctcagcttcccaagtagttaggactacaggtgtgtgtgccaccatgtccaggtaaggttttttatttctggggggtgggggagctgtctcgctatgttgccctggctggtcctaaattcctgggctcaaggaatccttgcactcagcctccccagtggctggattacaggcataagccactatggccagccctcctgtaatacttttaaatcatctctatgttaagcctggctaatttttgtttttttatggctttttgttgttgttgttgttgttattgttgttgttttgtagagatggaatttccccatgttgcccaggctggtctggaactcctgggctcaggcaatcctccctcctcggcctcccaaagtgttgggagtataggcatgagctactgtacttggcctagcagtggtgttttaaataaatatgcttttggccaggcatggcagctcacacccgtaatcatagcactttgggaggctgaggtggtagggctgcttgggcctgggaggttgaggctgcagtaatctgtgatcacaccactgaactccagctggttgacagagcaagacactgtctcaaaaactgtgtatgtatatatgctttggattttcatactttctctagcaccgcagactgctaaataatcatagtcaattaatggaaatgaactcctattcttgcttattatgaattaaaatgagtaaattatgaaaacatactaattattgatattttgtgtagatcagcaatatttgaactttctcccacctgagtggaaggcaagctaaacttggaagcactcttggatttttttgttgttttttctttttttattttaatatttttattgcttatatttcttttttacgttttaatctgttaaagtcaaagattttttaaattcctagactgatggagagtagttatttaaaagcttgacaaaataattttaatactgtctaaccagcaaagtttatgaaatctttttttttttttttttttgagacagggtcttgctctgtcacccaggttggggagcagtgttgcaaccatggctcactgcagccttgagtaccaggcccaagcaatcctcccacctcagcctccagagtagctgggcctacaggcaggcagtgccacgccaggcttattttttttagtagtgacagggtctcgctatgttgcccaggctagtcttgaactctcaagagctcacacaagcctcctgcctcggcctcccaaagtgctgggattataggtctgagccactgtgcccagcctgaagtctttaattgatacacctaaagttacttttatgatacatcattttatttatttatttatttatttatttatttatttatttatttattttgagacagagtcttgctctgttgttcaggctggagtgcagcggtgccatcttggctcactgcaaccttcgcctcctgggttcaaccgattctcctgtctcacccttctgaatagctgggattacaggtgtgggccaccaagcccggctaatttttcatttttagtagagatggggttttaccatgttggccaggctggtcttgaactcctgatctcaagtgatctgcctgccttggcctcccaaagagctgggattacaggcattagccactgcatccaaccttatgatgcataattttagagattgcttttttagacaaatattgaactcatgtattaaatagtttaatgaaaactcagactctatctgaatatgatacctcttttttttttacttttattcttaagttatatatatttattataaaaatattcaagttagtagggaatttttaaaaatgtaaaattctgttgttcatcttaaatcccatttttcagtagtgactactgtgaacactttttgggaggggggaggggacagggtctcactctgtcacccaagctggaatgcagtggcacggtcttggctcactgcaacctccaccttctgggttcaagagattcttgtacctcagcctcccaagtagctgggactacaggcgtgtgccaccatgtctggctaattttttgtttgtttgtatttttttgtagagacaggtttttgccatgttggctaggctggtctcgaactcctggcctcaagcagtccacccacctcggccttccaaagtgttgggattacaggcgtgagccaccatgcctggccctgttaacagttttgtgtgttaccttccatatctttatctatgcgtatacaaatctgtcctctgtaacccattttgtacatattttttattgtataatttattttttaaaaaattcttttcatagaatactttttcacactaaagattcccacagtgggaaaataacaatttattacttatagttttatgtttgtggacagattgttttagaacaagtaaaacacacttaagaattaagtctcaatttggaatttgtagtattttgatgcatctacaaggacgacctagtccttaagtggaacttctgtatattcagaagctctttaagcttttcttcacaggatttagaaattcataatgtgagaaatcggcatttcctaattttaaactttccctagtatatgtagtcatcagtagctggtatctaccaaacaaagagggaagtttttgaaaattaaacccggctaattttctgcaaagtttttattcatgaattaacagtatttccctttgtccatttttcccagggcaaatatagaagcagtttggtcaggtactggcagtaataaagctggattctctttaagagattgatgaggtcgagcgcggtggttcacgcctataatcccagcactctgggaggccgaggcaggcggatcacttgaggccaggagttaagagaccggcctggccaacatggtggaacctcgtctctactaaaaatgcaaaaattagcctggtgtggtggcgtgtgcctgtaatcccagctactcgtgaggctgaggcaggagaattgcttgaacgtgggaggcagaggttacagtgagctgagatcgtgccactgcactccagcctgggtgacagagcaagactcggtctcaaaaaaaaaaaaaaaaaaaaaaaaaaaaaaaaaaaaagtggagggaaatcatacgtttgcatctgtaatgtccatgtatcatggactctgccctagactagactagtgtcgtccagtgcagtagccgctagccacaggtagctattgaaaacttgaagctgggcatggtggttaatgcctattatctcagcacttgggaggctaaggcaggaggataacttaaacccaggagttcaagatcaggttgggcaacacagccagaccccatctctgcaaaaaattttaaaattagtcaagtgtggtggcatgcacctgtagttccagctacttggaacggtgaggcggcaggatcatctcagcctggaagatcgaggctgcagtgagccatgatggcaccacagcactccagcctgggtgacagagtgagaccctgtcttaaaaaacaaacaaacaggggccgggtggtgtggtgtcggtgtcggcagcatccccggcgccctgctgcggtcgccgcgagcctcggcctctgtctcctccccttccagccctcacctccacgcgggaccgctcgcgccagtcaactccgcgcacgttgcccctgcttggcagccaataaaagggggctgaggaaataccggacacggtcacccgttgccagctctagcctttaaattcccggatcgggcacctccacgcaccgcggctagcgccgacacccagctagcgtgcaaggcgccgcggctcagcgcgcaccggcgggcttcgaaatcgcagtcctccggcgaccccgaactccgccccggagcctcagcccctggaaagtgatcctggcatccgagagccaagatgccggcccacttgctgcaggacgatatctctagctcctataccaccaccaccaccaccattacagcgcctccttccagggtcccgcagaatggaggagataagttggagacgacgcccctctacttggaagaagacattcgccctgatataaaagatgatatatataacctcacctacaaggataaggaaggcccaagccccaaggttgaatatgtctggagaaacatcatccttatgtctctgctacacttgggcgccctgtatgggatcactttgattcctacctgcaacttatacacctggctttggggggtattctactattttatcagtgccctgggcataacagcaggagctcatcctctgtggagccactgatcttacaaagctcggctgtccctgtggctctttctgatcattgccaacacaatggcattccagaatgatgtctatgaatgggctcgcgaccaccgtgcccaccacaagttttcagaaacacatgctgatcctcataattcctgacgtggctttttcttctctcacgtgggttggctgcttgtgcgcaaacacccaactgtcaaagagaagggcagtacgctagacttgtctgacctagaagccgagaaactggtgatgttccagaggaggtactacaaacccggcttgctgttgatgtgcttcatcctgcccacgcttgtgccctggtgtttctggggtgaaacttttcaaaacagcgtgttcgttgccactttcttgcgatatgctgtggtgcttaatgccacgtggctggtgaacagtgctgcccacctcttcagatatcgtccttatgacaagaacattagcctccgggagaatatcctggtttcacttggagctgtgggtgagggctttcacaactaccaccactcctttccctatgactactctgccagtgagtaccgctggcacatcaacttcaccacattcttcattgattgcatggccgccttcggtctggcctacgaccagaagaaagtctccaaggccgccatcttggccaggattaaaagaaccggagagggaaactacaagagtggctgagtttggggtccctcaggttccttcttcaaaagccagccaggcagaggttttaatgtctgtttattaactactgaataatgctaccaggatgctaaagatgatgatgataacccattccagtacagtattcttttaaaattcgaaagtattgaaagccaacaactctgcctttatgatgctaaactgacattatttcttctcttatcctctctctcttctaggcccattgtcctccttttcactttgttgctatcatcctcctttctcttattgccacccaggcaagcagctggtcagtctttgttcagtgtccagcttccaaagcctagacaacctttctgtagcctaaaacgaatggtctctgctccagataactctctttccttgagctgttgtgagctttgaagtaggtggcttgagctagagataaaacagaatcttctgggtagtcccctgttaattatcttcagcccaggcttttgctagatggaatggaaaagcaacttcatttgacacaaagcttctaaagcaggtaaattgttgggggagagagttagcatgtatgaatgtaaggatgagggaagcgaagcaagaggaacctcttgccatgatcagacatgcagctgcctacctagtgaggacttcaagccccaccacatagcatgcttcctttctctcctggcttggggtaagaagtggctgtggtgtttggcaatgctaattcaatgccgcaacatatagtttaggccaaggataaagaagagacactttaagtttgtagtaaaagtggtctctgctggggaagggttttcttttctttttttctttaataacaaggagatttcttagttcatgtatcaagaattcttgaagttgggtgtttccataattggtaaaaacagcagctcacagaattttgagtattccatgagctgctcatcacagttctttcctctttctgctctgccatcttcaggatattggttgttcccctcatagtaataagatggctgtggcatttccaaccatccaaaaaaagggaaggattttaggaggtggagtcgggtcaaacaagaaatatatatatacatatatacattgcttagaacgttaaactattagagtatttccctcccaaagagggatgtttgaaaaaactctgaaggagaggaggaattagttgggatgccaatttcctctccactgctgtacatgagatggggaggttgagggacaggatctataggcagcttctaagagcaaacttcacacaggaagggatctgagaacacattgccgggggcttgagaaggttactgagtgagttattgggagtcttaataaaataaactagatattaggtccattcattaattagttccagtttctccttgaaatgagtaaaaactagaaggcttctccccacagtgttgtgccccttcactcattttttattggcggggtggggggctctgttaacatctagcctaagtatagaactgcctggggggcagggttaggaatctcttcactaccctgattcttgattcctggttctaccctgtctgtcccttttcttttactagatctttctcttccctgaacgttttcttctttccctggacaggcagcctcctttgggtgtattcagaggcagtgatgacttgctgtccaggcagctccctcctgcagacagaatgctcagggtcactgaaccactgcttctcttccgaaagtagagctagctgccactttcgcatggcctccggagtgtctccacctacacctctgtgctcccccgccacactgatggctcaagacaaggctggcaaaccctcccagaaatgtctctggcccagaaagcctctctctccctccctctctcatgaggcacagccaagccaagtgctcatgagccagtgggcctgccacagagcaaacgagggtttattttcagtcccctctctctggatcagaaccagagagcatgctgaatgcccctctgcttgctcggtaagggtgccccacctgaatcagtgctctcagctggcagtgcaatgcttgtagaagtaggaggaaacagttctcactgggaagaagcaagggcaagaacccaagtgcctcacctcaaaaggaggccctgttccctggagtcagggtgaactgcaaacctttggctgagacctgggatttgagataccacaaaccctgctgaacagagtgtctgttcagcaaactaaccagcattccctatagcctagggaatagtatagaagtctggcaaaaacagaaacagaacatcagtgttttgagaaccttggactactcctgtccctgtagctcagtcatcaaagcagaagcctggctttgctctattaagattggaaatgtacactaccaaacactcagtccactgttgagccccagtgctggaaggaaggagggcctttcttcctgtgttaattgcatggaggctacaggggttagcctggactaaaggcatccttgtgttttgagctattcacctcagtagaaaagaatctaagggaagatcactgtagtttagctctgttgacctgtgcacctaccccttggaaatgtctgctgttatttctaattccacaggtcataagatgccttcttgatgatatatgaacgataaaaacaactttcacttcttcctattgtaatcgtgtgccatggatctgatctgtaccatgaccctacataaggctggatggcaccctcaggctgagggccccaatgtatgtgtggctgtgggtgtgggtgtgggtgtatctgctgagtaaggaacactattctcaagattctaaagctcaattcaagtgacacattaatgataaactcagatctgatcaagagtctggatttctaacagtccttgcttcggggctgtgctggcaacttaactcgggtgccttacatcttttctaatcatagtgttgcatatgagcctgccctcactccctctgtggaatccctttgcacctgagagcctactgaagtggctggtagaaaaaggggcctgagtgaaggattatcagtatcgcgatttgcaggattcccttctgggcttcattctggaaacttttgttagggctgcttttaagtgcccacatttgatggagggtggaagtaatttgaatgtatttgatttatatatatatatatttttaaggttaaaagatggttgtagcatttaaaatggaaaattttctcctcggtttgctagtatcttgggtgtattctctctaagtgtagctcaaataggtcatcatgaaaggttaaaaaagtgaggtggccatgttacgctggtggttaaggccagggcctctcctaccactgtgccactgacttgctatgtcaccctgggcaagtcacttaactataaggtgcctcagttttccttctgttaaaatggggatgataatactgacctacctcaaagggcagttttgaggcgtgactaatgctttttagaaagcattttgggatccttcagcacagggattctcaagacctgagtattttttataatagcaatgtccaccatcaacttgatatgtccgtgtgtcccagatgctgtcattagtctatatggttctccaaaaaattgaatgaatccattggagaagcagtggattaactagccagacaaaatttgagaatgcataaaaaacacattgccacggaaacatacagaggatgccttttctgtgattgggtgggattttttccctttttatgtgggacatagtagttacttgtgacaagaataattttggaataatttctattaacatcaactctgaagctaattgtactaatctgagattgtgtttgtttataataaaagtgaagtaatccaaaaaacaaacaaacaaaaccataaaacaaaaccttgaaatgtggctaatctggattgaattatgctgtaaatgtaaaatacacatcagatttctaagagttagaacataaaagagaatgtaaagtatctcaccagtaatttttttaattgatcacatgttgcaatggtaatgtttaggggtatattgggttaaataaagcatgttattaaattaattttagctgggcattgtggcacatgactgtagtcccagctgctgggaaggctgaggtattttttaaagtgagtgttggccaggtgcagtggctcatgcctataatcccagcactttgggaggccgaggagggtagatcacctgaggtcaggagtttgagaccagcctgaccaacgtagtgaaaccccgtctctactaaaaatacaaaaattatccaggcatggtggcgcgtgcctgtaatcccagctactcaggaggctgaggcaggagaatcgcttgaacccaggaggcagaggttgcagtgagccgagatcgcaccattgcactccagcctgggcaacatcagtgaaactccatctaaacaaacaaacaaacaaacaaacaaactgaatgttaaggattgctagagcccaggagttcaaggtgcagtgagctatcatcatgccactcactgtactccagcctgggcaacagagcaagaccctgtctctttaaaaaaacaaacaaacaaacaaacaaaaaactatgttgcccaggctggagtgtactagctatttacggtattcacaggcacaatcatggcacgctatgggctggaactcctaggctcaaatgatcctcctcttcagactcccaaatagttggaactacaagcccttgttagcacacctgattttttttttttttttttttttttgagatggagtctcactctgtcacccaggctggagtgcaatggcgcgatctcggctcactgcaacttccgcctcctaggttcaagtaattctcctgcctcagcatctcctgtagctaggattacagacacgtgccaccacacctggctactttttgtatttttagtagagatgaggtttcaccatgttggacaggctggctcgtctcgaactcctgacctcgtgatctgcctgccttggcctcccaaagtgctggaattacaggcatgagccccgtgcccagccacgcttgagtttttaaaaagacctgggtgtttatctgggatgtgagcccgtttccttttactgtttttaatatgactgctaaaaattttaaactacacatatggctcacgttatatttccactggacctcgctgctctgaactaacagatgaggaccataacactggctttaaaaattacgtaatatgggctgggcgcggtggctcatgcctgtaatcccagcactttgggaggccaaggtgggcggatcacaaggttaggagactgagaccatcctggctaacatggtgaaaccccatctgtactaaaaaatagaaaaattagccgggcgtggtggcgggcgcctgtagtcctggctactcaggaggctgaggcaggagaatggcaaaaacccgggaggtggagcttgcagtgagcagagatcgcgccactgcactccagcatgggcaacagagccagactctgtctcataaataaataaataaataaataaataaataaataaataaattacataatatggcctggcacagtggctcaagcctgtaaactcaggaatttaggggaacttggccgggcactgttgctcacgcctgtaatctcagcactttcggaggccaaggcgggcagattacttgaggtcaggagtttgaaaccagcctggccaacctggtgaaaccccatctctactaaaaatgcaaaacaattagccgtgcctggtggtggtagtggatgcctgtaatcccagctacttgggaggctgaggcaggaaaatcgcttgaacctgggaggtggagattgcagggaaccgagatcatgccactgcactccagcctgggtgacagagcaagactctgtctcaaaaaataaatagataaatagatagatagatagatagatagatagatagataaaaaggggaacttggaatggagaccatgcgggagtggtgctgggtacgaggcctgtgtatcttgttccagggctatcttgagtcacggtcccctgacgtgggctgctgtcatctcatcatctcaacaatggccaggttgtagattaactgccttgaggtgatctctggtatttagcagttgggtcttcatgcctgatgtatttcaaaattagcccctggagtttctaaatatgtgcataattagataagcgagcactgtgcacaagagtatctatctggtgggaagggagagaaacaaagagctttatttattcatttattttcgagacagagtctcactctgttgcccaggctggagtgcagtagcatgatctctgctcactgcaacctctgtctcctgggttcaagctattctcctacctcagcctcccgagtagctgggattacaggcttgcaccaccacgcctagctaatttttgtatttttagtagagataagctttcaccatgttggccaggctggtctcaaactcctggccgcaagtgatccacctacctcggtctcccaaagtgctgagattacaggcatgagtcaccaggcccagccaacaaataattttaaagtatgtttcaaggctaaatgtaagaaaggaaaaaagtttcaaaacgcattttgaagctgagctacttggttacatattgatgcttttatttctgtaggatagatttcccaaacagactgctagctcaaatgttattttccaaattggctttagcaatttatattcccaccagcatgtatgagtgtcctttactcatgctttcagtatgaggtatgattactctttttatttgtttgtttgagacagggtttctttcgctctgttacccaggctggaatgcagtggcatgatctcagctcactgcaacctctaatcctggctcaagtgatcctccagcctcagcttcccaagtagctgggaccaaaggcatgagccaccatggccagcccagttttgtatttcttgtagagacggtgtttcaccatgttgtccaggctggtcttgaactcctgagctcaaagttatctgcctcccttggcctcccaaagtgctgagattacaggcatgagccaccgtgcctgatgcagatatggttactctttataacttttgtcagtcactgaaaagtggcatctctttcttgttttaatttgctttttcctgaatagtgaggctgaacagtatctttttatatttttattgaccatttgaatttcctcttctgcaatttgcctatttgcagcctttgtccatttttctatttgtcattagtttctttctaattactttgtagaaactatttatatgttacagactttcattcatatgtgttacaaatattttccccaatctattgtttttttcttaatttcgtttacgctctcaccatggaaaaaacttaactttcctttatgattcctcttaatcaagttctcttcatacacacctcctcacttttatttttattattttatacttagatatctaatgcatttcaagttatattatcttacatgatataacatagtggctgattgacccaaatttgcaatcaactctataaaatagaatctctactacaatgccttaatcaaataggggtgaggcatggtggctcacacctgtaatcccagcactttgggaggccgaggtgggcagattacctgaggtcgggggttcgagaccagcctgaccaacatgaagaaatcccaactctactaaaaatacaaaattagctgggcatggtggtgcatgcctgtaatcccagctacttgggaggctgaagcaggagaatcgcttgaacccagcagacggaggttgcagtgagccaagatcacgccattgtactccagcctgggcaacaagagtgaaactctgtctccaaataaaaaaaaaaaaaaagtttttttttggtttgttttttcatataacaagaagaatagaagtaaaagatcaggacaggtgtggtggctccaccatgccatcaaagatccagacatcttctccctttcggttccacaactcagggatcattcttttcttttttctttctttctttctttttttttttttaagatggagcctcgctctgtcgcccaggctggagtgcagtggtgcgatcttggctcgctgcaacctctgcctcccgggttcaggtgatcctcctgcttcagcctcccgagtagctgggattacaggcacctgtaccttgcccggctaatttttgtatttttagtagagaagagttttgccatgttggtcaggctggtctcgagttcctgacctcaagtgatctgcccacctcggcctcccaaagtgctgagattacaggcacgagccaccatgcccagcctattattttctttttcaggcaagccagtttctttactaaaagggtcatatttacatgttacgggcaggaagaatatagggtgaaggacacccttcttttctttttatcaagaaaacaatagctttcctggaaactgtacccattagacttctaattgtgtctcaccaagtgggacatggccactcttattttcaagagagtctagggtggtaaatagatttgtctgggcacattgctgccctaaacaaaatcaagattctgaatgaaaattgggtagggaactagcggtgtctgccataggagctagctttattttcttctagttgtatactcaattatgccagaaacgtaaaataaataaaataaaaaataaaataataaaataaaataaataaataaaaagtcatcttggtccttgtattagtctgttctcatgctgctataaagtactgcccgggaccgggtgatttataaaggaaagaggtttaatcaactcacagttgcacagggctggggaagcctcaagaaacttacaatcatagcagaaggggaggcaaacacatccttcttcacctggtggtaggaaggagaagtgcccagcgaagggggaaaagccccttatagaaccatcagatcttgtgagaactcactcactatcactagaacagcgtgggggtaactgcccccatgatttaattacctcccactgggtccttccacgacatgtggggattatgggaactacaattcaagatgagatttgggtggggacacagccaaaccacatcagtcgtttattagattgccatgtagttcgatcaattttggggttctatttttcttgttttaaaaaatagagatggagtctcgttctgttgcccaggctggaagtatacaagcatgatcataactcactgcagccttaaacttctgggctcaagcaatcctcccacctcagcctcctgggtagctgggactacaggcacatgccagcacacccggctaccttttttatttttatttttcgtagaaatggggttttgccacgttgcccagggtggtctcaaacttctgggcctcaagtgatccgtgatctaccctcttggcctcccaaaatgctggaattacaggcatgagccatcacacccggcctaatttaaaaaatatttatagacatggggtctcactttgttgtcaaggctggttttgaattcctggcctcaggccaggcgtggtggcctgtaatcccagcactctgggaggatgaggtgggccagaggccaggagttcgagaccagcctggccaacatggtgaaaccctgcctctactaaaaatacaacaattacctgggcgtgatggcaggtgcctgtagtcccagttattagggaggctgaggcggagaatcacttgaatctgggaggtggaggttgcagtaagccaagatcatgccgctgcactccagcttgggtgacggagaaagaccccatctcagtaaataaataaataaataaataaataattctggcctcaagccaccctcccgccttgggctcccaaagttctggaattacaggcatgagccactgtgctattttctctaatgatctagatgtctattcctgtgccgacagcatactgttttatttatcatagcttcattttaagtttaatatatgataagacaggtctcctttgctggtcttcctttccaaatattcttgaccatctcatttattcttctatatgaatgttaaaattactgtctagctttttaaaaaattgatgtattctgattctaatttcacttatatgctaatttggatttatatgttacatttatattttaataaaagaattagcacctttatgatattaattcttcctattcaaaatcatagaatatttttccttcatttaaaggtatgatttttaggtctttagaaaaggtctaagtcttgaatttttatgtagccaaatttatagaaaaaattttccttatagcttctgaatttggtaacacgtgctttaaaaggccttttccactccaagattagaaaaatattcatccatgtttcccttagtacttttctggtctcatattttatctttaatttttgatgcatatgtagtttattttggcataaagtgatgatttaggtcttttttttaaagtctaaccagttgtctcattacatttactgcataagccacctttctcccactgatctggaattctagttttatcatatcatgaattcagtgtgtatttggatccagttttcatttttgcaatttgttctgtttctatatgaatacaataaacatttagcatctttggagtgctaagtgatttcatcaaaatatttaatgttcaattccctgtgaattccatatttttcttccattttgagataagaaaagtgaacctagagaaggtaagttaattggccggtcacagtggctcacacctgtaatcccagcactttgggaggccaaggcgtgcagatcacctgaggccaggagtttgagaccagcctggccaacatggtgaaacctcatctctactaataatgcaaaaattagccgggtgtggtggtgcacacctgtaatctcagctactcaggaggctgaggcaggagaattgcctgaacctgggaggcagagcttgcagtgagccgagatcgcaccactgcactccagcttgggcaacagagcgaaactccatctcaaaaaataaaaaatagataaaaaataaaagagagagagagagaaggtaagttatttctcatgcgttcggatgtgggctcttgtactttccccagggagagcagctcgtagtcttcattacttcagagttgggatgagcattcacattagaagacatggatgaggttctgaggttattattatggtattgatctagggaccaagcaatgcctaggtccctgggtgccctcttctctttggcgttctagatcgaggaagctacagagaggtatacacaaggaatggaaacccagtacctcccactatgcagctctgttatgttccatattttctctcttctccctgaaactaacatgacacagactgcagaggaggcctctataagagaacaaaagagaaataaataaggcccaaggaatgccttgaactctgaccaatcatattaaccaaccactcctcctaggagctgaggggcctaggaaagtctttttggggcggtagtcctggggaaatggagcagaagtgctctctcccaagatctgcaaagttgaaccatatatctctagtgtcaccaaagggctacagagattaaaaattgaggtggggttgatggtggttatggttagagtcattgtttcctgagtgtttttatgttctcagcctatgagtgtttgccacttctacgaaccccagttcctcagaatttctcattagaaacctcaagaattgcctatagggtatgtgaactcctggctgctggtgtcttccatcacccaataatcgaaaaacatatcattgtttcaagatctcttttgaaaaatagtttcactgggatataattccagtttgacaatgattttcctttcagacgttagaagtgttattctgctatcttctggcttcttctgtttctgttgagaaatctgctgtcattttcatttgtttctttgtaggtaagatatatttctctctagctgttttaggatcgttctcttcagttttctgtagtttcactatgatgtgtcttgatgtggatttctttttttttttctggattgcagttcactgagtttctttaagaatttgggtctcattaattcttgaaaattctcagtcataacctttcaaatatggcctctgccccattttctctatttcctccttctggaaatccaggtatacattggatctttgcactctatcgtccatgacccatgatctttcacgctttccatttctttgtctctgtgcattctgggtaacttctttggggctatcttctaggtcacaaattattcattcatactattcatctgtttaatctttccattgattttctactttcaaatattataattttctttttttaaattttttgcctctcccaaaatcaggtgttatttttaaaaattattgttattattattattttgagacagagtctcactgtgtcgcccaggctggaggagtgcagtagtgcgatctcagttcactgcaacctccccatcccggggtcaagcaattcttgtgcctcaacctccggagtaactgggaccacaggcctgcgccatgacgcccggctaatttttgtatttttagtggaggcagggtttcactatgttggccaggctgctcctgaactcctggcctcaagtcatccactcgcctcagcctcccaaagtgctgggattacaggcatgagccactgcacccaaccttattataataattttcatttcaaaagttgtttgattccctaatcactacctactttcatgctgtgttttaacctagtcaaactgctggtctcatatgttttgttttttgtctttgagagagtctcactgtcacccaggctggagtgcaatagcatgatctcggctcaccgcaccctccacctcctggattcaagttattctcctgcctcagcctcccaagtagctgggattacaggcgtgtgccaccacatctggctaacttttttttttctgaattggagtcttgctctgtcgcccagactggagtgcagtggcacagtcttggctcattgttccagcaattctcctgcctcagcctcccgggtagctgggattataggcatgtgccactgtgcccagctagtttttgtatttttagtagagatggtggtttcaccatgttggccaggttggtcttgaactcctgagttcgggtgatccacccacctcggcttcccaaagtgctgggattacaggcgtgagtcatggcgcccggcctggtctcatatgttgctagtagttaaagcaagataatgggtacctaggaatttgttagatttttatctacttttggcatattaaatgatttccataataagttttaaagggcagggagggggtcatcacactttaaaaagttggggataattgaacaataggccatatgaaaacatgacaatttaaactgggttatggagaagacagaattgtggggcatgaaacttttctggaatacagtggaggattctgaatgggttgaggacagcaggaagggaggctgtggatatgtgggagacaggaaagaagaggcagagaataggaagtgggttccaacccatgatgggaggaaaccaacacggtctgttccattttcctcagggccctaggaccacagagccactaagataatctatatgctgccttcatttgaatatcaaggactgctggtgtctgggttcagggaattttttccattgctcccttctgtctagtctggtatagccggtctgacctcttggctcaactggtatcatctccaaccaattcgtgccatgccttgctaagagaaagaccataagaggcaatgaagaaaagaacagttcagacttcttttcttaggtgacataattctgtctttccactttctgtcctgtcatgaaaaatttgaagaaaaattttaattaaagtatacacattcaactgggcatggtggctcatgcctgtaatcccagcaatttgggaggccaaggcaggaggatcacctgaggtcaggagtttcagaccaacctggccaacatggtgaaacctcatctctactaaaattacaaaaattagccaagtgtagtggcacacgcctgtaattccatctactcaggaggctaaggcaggagaatcacttgaaaccaggaggtggcagttgcagtgagccaagatagtgccaatgcactccagcctgggtgacagagcaagactctgtctcaaaaaaaaaaaaaaatctgcatgcacaagcagagaatatgtattaaaaaaatcagcagagcctcacattcaaggattttctacacaagaaaccattcctaaaatatgtgcttggaattactagggtttctcttgcaaacattttaataacacctcattcttttaaaattgtggttatatatatcatgttattagatcattacagcaactctcctgggtaaagcggttatttctaggtcattttatagaaggaaaaacaaccagtacttttttttgctttacttcagtagctattgcctccttcagtttgaaatttcaatcctggcacgtagtggaggctcaacaaatatttgttggaggaatgccatttaaaatacaatgactggataggagaatatttaagggcattaacattttttaaaagccaaaaaaaattacaattggacttaggagattttgatttttttgtgtgtattttcttttaaaaaataagcttctctaggctgggcttggtggctcatgcctgtaatcccagcagtttgggaggctgaggcgggtggatcacctgaggtcaggagtttgagaccagcctggctaacatggtgaaaacccatctctactaaaaatacaaaaattagctagtggtggcggcatacacctgtaattccagctactagggaggctgaagcaggagaatcacttgaacccgggaggcggatgttgcagtgagccgagatcacaccactgcactccagcctgggtgacagagcaagactccatctcaaaaataaataaataaataaataagtaaagtatataaataaataaccttctcttttggcttcctccaatgtactctctttgagtaggaagaaattacattgttatgatttagactagtaaattcttttttttttttttttttttttgatatggagtttcactcttattgcccagcctggagtgcagtggcgtgatcttggctcactgcaacctctgccaccagggttcaagtgattctcctgcctcagcctcccgagcagctgggattacaggtgccggccatcacacctggctaatttttatagttttagtacagatgggttttcaccatcttggccaggctggtcttgaactcctaacctcgtgatccacccgcctcggcctctcaaagtgctgggattacaggtgtgagccattgtgcctggccgacaagtaaatgcttacatcaaaaaactgagttagaattggtccctggagctgttttctctccctaaaatgatgacgtcaagctatcatgtataataaataacaactcaattgaccacatattttcctttaagcctaatgaggaaataatattatagtgaaatacttagaagttttaagggaaaaaatcctttgtcattaaattaaaatttaaaccgaaacaatcacttgactgttttagaataaaattggcatatgaaaggtttgatagccaacgacagtaagattaacatactacagcatttgcctttagcatttactgagtaatacttaaagctatcataaatgtgcaaatgaagacattgtttattgttttactgctgagattaatattttttcagatttctaaaacattacaacaaatgcacacatgagggcgctctaatcagacagatacggagagggtaggcatttgttgactgttaagttcaaaactagttgtagccgggcgggcggggtggctcaggcctgtcagcccagcactttgggaggccgaggcgggcggatcacgaggtcaggagattgtaaaccatcctggataacactgtgaaaccccgtctttactaaaaatacaaaaaaacaaaaaaagccaggtgtggtggctggcgcctgcagtcccagctgctcgggaggctgacgcaggagaatggcgcgaacctgagaggcggagcttgcagtgagccgagatcgcgcagccgcactccagcctgggcgacagcgcgagactccgcctcaaaaacaaaaaacaaacaaaaaaaaaaccaagctagttctatacttttacagatggaaaaatcaaggtccaccaaagaggttatgattctacatcagttattctctagaggaaataaattgggtattagaattttaaaaagattgaacagaaatccctgtcagtgaatttatgctggataattttgactcttaccccagcaactccttattgaaaatctttacccatggcatgatataatttatctacaatcttaaatgggttcggcaatagtgtttataggatgtaggagaaagacttaattagaatatttatttttatgaacttttgctctataaaattataaaatgttaattgtacttcatttatacttttttttttttttttttgagatggagtctcgctctgtcgcccaggctggagtgcagtggcgtgatctcagctcactgcaacctctgcctccggggttcaagcgattctcctgcctcagcctcccaagtagctgggactacaggcacacaccaccacgcctggctaatttttgtatttttagtagagacggggtttcgccatgttggccagagtggtctcgaactcctgacctcaagggatctgcccgccttggcctcccaaagtgctaggattaccggtgtgagccaccaacacctggcccatttatacttaaagctgattttcaactgatttgggtaagatccttagtctttccccatctctgacataattcctagtttgtcctttggctttcctatgtatataaagctaccaggctgcttgcagattttccagggaaggagtcccataaacactcacaaagattttattagggagaagctatgatgggaatatagaatgtagtttttttaatttaaaaatcagtatgggccgggcgcagtggctgaagcctgtaatcccagcactttgggaggctgaggcaggcggatcacgaggccaggagatcgagaccatcctgggtaacacagtgaaaccctgtcttctactaaaaatacaaaaaattagttgggcgtggtggcgtgcatctgttgtcccagctactcgggaggctgaggcaggagaacggcgtgaacccgggaggcgcagcttgcagtgagccgagatcgcgccactgcactccagcctgggcgacagagcgagactcagtctcaaaaaaaaaaaaaaaaaaaaaaatcaggatgagccggccgcagtggctgatgcctgcaatcccagcactttgggaggccgaggcgggcggatcacgaggtcagcagatcgagaccattctggctaacacggtgaaactccgtctctactaaaaaatacaaaaaattagccggaggcggtggccggcgcctgtagtcccagctactccggaggctgcagtcccagctactccagagtctgagtcaggagaatggtgtgaaccctggaggcagagcttgcagtgagcggagatcgcgccactgcactccagcctgggcgacagagtgagactcagtctcaaaaaaaaaaaaaaaaaaaaaaaagcagtatgtagagctgggcacggtggtgtgtgcctattagcccagccactggggaggctgaggcaggagaagcccttgagcccaagagtttaagactagcctgggcaacacagcgagaccctcatctcaaaaaaaaataataaaataaagtattgcaatatttattatataggcaaattttttttcaacttaagcactaccctcatcaagggaagatttgtttgattagatccccacacaggctggccacttcctcatttctactttttcttttctttttgagatggagttttgctctcgttgcccagggtggagtgcaatggcacgatcttggctcactgcaacctccgcctcccgggttcaagcgattctcctgcctcagtctcccaagtagctgggattacaggcacctgccaccacacccggctaatgtttgtatttttagtagagacggggtttcaccacgttggccaagtttgcctcgaactcttgagttcaagcgatctacccgcttcggtctcacaaagtgctggaattacaggtgtgagccaccgcgcccggcctcatttctactttttcaaagaagtcaattttctttaaaaaataaactcttttggccacacggtggctcattcctataaccctagcactttgggaggcagaggcagacggatcgcttgaactcaggagttcaagaccagcctggccaacatggtgaaaccctgtctctacaaaaaattagctggatgcagtggcacgtgcctgtactcccagctactcgggaggctgaggcaagagcatcacttgagtccaggaggcagaagttgcagtgaactgagatcacaccattgcactccagactggctgatgggagtgaaaccctgtctcaaataaataaataaataaataaataaactcttatttaaaaaaaaaaaaagcaaatcatgaaacaaaacaaaacccagggctctgaatgaaacagatctctcctttagggggctagatgatggaaaagaaaatatatcatgaatttcatgttctcatttgtcttcattaatgacttatatgtatatatatttccattgaagacatagatatgcatttgatcacctacatttgtttgtattttgagtcataaattaagtcatttcctgtccagaaagcacctgacaatcttatgataaaaaacatggaattttaaaatcacaaatgcaaataacaagccaggcacagtggctcatgcctgtaatcttagctttttgggaggccaaggtgggcagattgtttgaactcaggagtttgagaccagcctgggtaacatggagaaaccctgtctttacaaaaaataaaaaattagtggggcacggtggcatgtgtctgtagtcccagatactcaggaggctaaggtgggaggagtgcttgagcccaggaggtcgaggctgctgtcagctgtggtcgcaccactgcactccagcctgggtgacagagtgagaccctgcctcaaaaaaaaaaaaaaaaagaaaaaaaaaggagtgcaaataacagatgaccttacaaacatcaaaagttatatctttatttataataagttttgtctatatttaatgaaatatattagacaagtaaaaaatgtagcagtatgcatatggctttattttatcttggccctgcccactactctgccctcatctcttttccttcccactgagtccttccacattggccacatcacagcaaacctgacaagcttctgcctgaaatagcaccatggcacttctcttccctttgcctgaaacattcttttttttttttttttttttatgagatggagtctcactctctcaccagactggagtgcagtggcacgatctcagctcactgcaaactccacctcctgggttcaagcgattctcctgcctcagcctcccgagtagctgggattacaggagcataccaccatgcccagctaatgtttgtatttttagtagagatggggtttcaccatgttggccaggatggtcttgatcttttgaccttgtgatccacccgcctcagcctcccaaagtgctgggaatacaggcatgagccaccgtgcccggccaacattcttattccccttttctttgaccattgaacaaaagctctaagatagcaaaggctttgtctggttcagtaagggtctcaacagaaaaacgatggaacagtcagaataattactggacattttatataaatggaatcatacactatgtgacgtgtttttttgtgactggcttttttgactcagcataacattttcaaggctcattcatgtgctagcatgtgtcagtatttcattcctttttgttgctcaactgtaaagtttattgacacagtatttattttatttagtaaagggttatttacaaatgtaaaagggtagaggaatcataaaaatgagtgtagtatcccggagccagtagcagctgccatgttaccatctttagacccaaaatggcaaggggaatagtggtcagttgaacctaaaagagtcagcgtgtaaaatcggctgccctggaagagcagtggccttcactggagagacacagccagcccaaggtcccctctcagtgagggagatgaaacagtaagtatcctgagcctaccttcctttccactctaatttcctgcctggattaccagttggccaaacccaaccaagacatgggaacccttttgatgtggattataaggtcagcctctgagagcagagtggagatgggggaagagtgggtctagaaaggtaaacagaagacatatgacaatttctgtatttgcaacacctagaacattgccttacatatagcgattttaaaaactgtaacaactttattgaggtttaagtcacaaaccaggcagttcaccaattaaaagtgtataattcaatgggttttaatatattcacagagttttgcagtcatcaccacagtcattttttttttttttttttttgagaccgagtttccctcgttgcccaggctggagtgcaatgtcatgatctcagctcaccacaacctccacctccctggttcaagcgattttcctgcctcagcctggtatgcaccagcacgcctggctaattttgtatttttagtagagagggggtttctccacgttggtcaggctagtcttgaactcccgacctcaggtgatccacccgcctcggcctcccaaagtgctgggattacaggcatgaacccccgtgcccggccaccacaatcaactttagaatattttcatttctcccaaaaagaaatcccatacccatgcgcagtcactccccatttcctccatccctcagtcctaggcaaccactaatttactttcttttaggataggatttgcctatcttgacatttcatataaatggaaccatacaatttgtggtcttttgtgactggcttctttcaagtaacctaatgttttcaaggttcattcatgttatagcatgtgtcagtacttatttcctttttttttatggctcaataatattctgttgtaggaatacaacacatttcatttatctgtttgtcacttttttttttctttgagatggagtctcagtctttcactcaggctgtagtacggtggtgtgatcttggctcactgcagcctccacctcctggattgaagccattcacctgcctcagcctcccgagtagctgggattacaggcacgtataccatgtcccgctaatttttgtatttttagtagagatcggatttcactatgttggccaggctggtctcaaactcctgacctcaagcgatcctcctgccttggcctcccagagtgttgggagccaccatgcccagctgtctccactttttgactattatgaataatgctgctatgaacattcacatataagtttttgtgtggacacatgttttcatttcccttgggaatatgatgaagcctggcattgccaggtcatatgataactctatgtttaaactttggaggaactgccagactatttccaaagcagttccaacttcattgcaaagcattttacattccctccagcaacatatgagtgtttcaatttttccacattctctccaacacttgttattatctgtctttttattatagccattcctgtgagtgtgaagtggtttcttaatgtggtttggatttgcacttccctgatggctaataatgtttctatggtttgaatgtttgtgtcctccaaaattcaagttataacctaagacctaatgtgatggtgttaagaagtgaggccttcaaggtggtgattaagtcatgagtgctctgccctcgtgaatgaaattaatgcccttataaaaaggcttcacatagcatttcttcttttttttcctttcttttcctgctatgtgaagatgccactgtgagaacaggaacaatggaataggccctcaccaaatgccaaatatgctattaccttgattttggatttaccagccaccggaactgtgaggagtaaattttttgcttctaaattactcagtctcaggtattttgttatagcagcacaaacagactaagacagaaattgagtgtattttcttgtgcttattggtgatttattttctttgttttatttttatttatttatttatttatttatttatttttaggtggggttttgctctgttgcccaggctggagtgcagtggtacaatcttagctcattgcaaactctgcctcccgggttcaagtgattcttgtgcctcatctgcctgagtacctgggactacaggcatgcgccacacgcctggctaatttttatatttttagtagagatgggttttcgccatgttggccaggctggtctcaaactcctggcctcaagtgatccacctgccttggcctcccaaagtgttgggattataggcataagccacagcacctggcccttattggccatttgtatgtcttctttggagaaatatctgttcagatcttttttccattttaaaatcgggttatatcctttttattatcaagttgtaagagttctttatgtattctagatccaagtccattgtcagatacagtagtcccccttatgctttctgcagtttctgttacctgcaggtagctgcaatcccaaatattacagtattttgagagagagaaaaaactattcatgtaacttatattaaagtatattctagccgggcacggcggctcacacctgtaatcccagcactttgggaggctgaggtgggtggatcacaaggtcaggagtttgagaccagtctggccaatatggggaaaccccgtctctataaaaaatacaaaaattagccgggcatggtggcaggcacctgtagtcccagctacttgggaggctgaggcaggagaatcgcttgaaccccagaggcagaggttgctgtgagccgagatggcgccacagtactccagcctgggcaacagagcaagactccatctcaaaaaaatatatatattctaattgttctattttattattagtttttgttgttattctattacagtgcctaatttataaattaaactttatcataggtatgtatgtatgtataggaaaaaacatagtatatatagagtttggtactacctgcagtttcaggtatacactggaggtcttggaacatattttgttatgtatatatatctatatatttataaatatgtatttatgtatagctatatatttatgtatctatatctataaatatatgtttatatatctatatatctatatctataaatatatgtttatatatctatatatctatatatctatatatagatctatatctatatctatatatatttatatatagatatatgtatttatctatatatatagatatatagatatagatatagatagatatatatttatctatatatagatatagatctctatagatatatttatctacatatagatatatagataaatttatatctatatctagataaatatctatatctatatctatctatctatatattttttgagatagggtctcggtctattgcccaggttggggtacattaatgcaatcttgggtcactgcagcctcaacctcctgggctcacgtgattctcccacctcaacctcccaagtagctgagaccacaggcacatgtcaccatatctgggtaattttatttatttattttagagatagggtctctctatgttgcccaggttagtcttgagctcctgagctcaagtgatcctcccacctcagccttccaaagttctggggttacaggcatgagccactgtgtccagctacatattttccacaaataaagtgggtctactttgtatatgatttgcaagtattttctcccattctgtgggttgtctttcacctttttttttcttgagtcctccaaaattcatgttataacctaagacctaatgcaatgatgttaagaagtgaggccttcaaggtggtgattaggtcatgagtgctctgccctcgtgaatgaaattaatgcccttataaaaaggcttcacatagcatttcttctttttttttgcctcagcctcctgaatagctgggattacagacatgtgccaccatgcatggctaacttttgtatttgtagtagagacagggtttcaccatgttggcgaggctggtctcgaactcctaacctcaggtgatcggcccgcctcggtcttgcaaagtgcggggattgcaggcgtgagccaccacgcccagcacatgcatcaatttttatgattccttgcttgaactgatcaaccagtcaactactgattccaataaggttggatgaggtggcttatactctacttatttgccgcccccccttcttcctttttttttttttaagacagggcctttgacacgctggctggagtgccatggtgtgatcttggctcactgcagcctctacttcctgggctcaagcagtcttcccacctcagcctcttaagtagctggaactacagatgtgtgcccctatgcctggctaatttttgtatttttgtcgagacggggtctccccatgttgcccaggctggtctccaactcctgggctcaagagatccgcccaccttggcctcccaaagcgctgggattacagacatgagccactctgcccggcaacttgtaacaattctttgtatgttcttgatacaagtcagttgtcagatacagtggtagtacataattaaacataattatatagaattatattttatataagtgcagcattatataaaatagcaaaaatttggaaataaccaaatgtccaacaataggtagttagctaaatacattgtgaaacatccatgtaatgaaagctatactactataaaaaatgatctagatctatttatactgacatcgacagatgtctaacataaattacatgaaaataggaagtgacaaagaagagagtttggtataatctcatttgcattaaagtaatcaaaaaaaccaacttatataatagatacaggctgggcaggatggctcacgtctgtaatcccagcactttgggaggtcagggcaggaggatcacttaagcctaggagttcaagatcaggctgggcaacatacccagaccccatatctacaaaaagtttaaaaattagccaagtgagctacgatcatgccactgcactccagccttggggatagagcaagactgtctctaaataaaataaaacaaaataaaataaaatacgctgggcatggcagctcatgctgtaaaagtgctgtaatcccagcactttgggaggttgaggcaggtggatcacctgaggtcaggagttcaagaccagcctggccaacatggtgaaacctcatctgtactaaaaatacaaaacttagctaggcatggtggtgcacgtctataatcccagatactcgggaggctgaggcagaagaattgcttgaacctgggatgcagaggtcacactgagctgagaccgcaccattgcattccagcctgggtgacagagcaaaactctgtctcaaaaaattaaaataaaataaagtaaaataaaatataatagatatagctacatatgtgtgaaaaggacaataacattaaattatgagtgttttctgttgctgtttctgtcctcccttgggggacctttctaagggggaagcagtcttcatttacttgacgaattgtccaaccatgaggtcacttaggctgaaaactgaaaatgcctatatactgctttacttatgaataggaaaacataaaaggaaaagaaacaagaggaagtaggtttgagacaatgtagctatgagtttggaggaagaaagagagaaagggcagttttgtgagatagagggaaaatggctaacgtggacattttggaagttttattgtgacatgcagtgtaattttcagttattcattttctcaaagctgcaatgaagttctccattgctctctaaggcttttggagttgttattgtgttttataaaatctatatctgcagatagagactgacctcatatatgaatagaaaaaaaatctgaagaagtaaaaatcgtcgataatgataatctctggagagaaaattttctggggaactttcattttctctattgtgtctttccgtaaggttagaaagttttgttatgagtatacattcctttagttactaggaaatgaaatgtaacactgtggggcttgttcccttatttcaggactagggattaaagtagtgaaataaaaatgacttttaattccacctgatgagtttagatcacagctttctcattgataatattaaaacaagcagctgcttttattttggaaggcattaactcaacttaagtttcattaaagatatttgctcaagcactgtagcacttgggattgtctgctatgtagggtggatatatgtgtgtgtgtgtccacaaattgtttaatactttttatcaactttagttcataagccttctgcaaacattttcaatgactgcctgcttgtatataatgttagatgttgcaaattgaccttagaaattgtaacagataattaaatgagttcactctgctatttacacaatagagcctagtttatttaatttgtgggaaccaagattcagaaagcagtaggaaggagctatcagtttttttgtctgaaagggctcttcttcctggattttaatgttttaaaggagaaagtaataacaaagttgccagatcctgttctttctctgcattgaggtcctgtaacatggtggttattcacattgactcttggttcacagcaagttgttggctgcatgggttcacagcgtagttctgtgacctcaagcaagccagttcacctatttgtgcctcagttttctcatatataaaatgaggagataggccgggcaccatctgagttcaggatttcaagaccagctgggtcaacatggtgaaaccccgtctctactaaaagtacaaaaaattagccgggtgtggtggcagacacgtgtaatcccagttacttgggaagctgaggcaggagaatcacttgaactcaggaggcagaggttgcagtgagccgagatcatgccgctgcactctagcctgggcgacaaaatgagactccatctcaaaaacaaacaaacaagcaaaaaaaccgaggagctaatgccttccttcactgggttgctgtaagcattaaataagaatatatatatagggttgatagcaatgcacctggcataaactgtgcttaatacatggaaactaataatagtttgttattcttgaattttcttttctctagaattttgaaactattttagaaataacaaagggctgtgaattttaccaaagactacactgaattcaatctgatgtaaatcaagttgcaatcatggcaaacttgaagtagtattgtgaaaacgtttttgtttgtttattttttaagttaagggttacggccgggcgcagtggttcactgatgtaatcccagcactttgggggccaaggcgggcagatcacttgagctaaagagttcaagaccagcctgggcaacatggtgaaatcccatctctacagaaaatacaaaaatttgcttggcgcgaggttgcacacctgtagtcccagctacttgggaggctaaggtgggaggatggcttgagcctgggaggcagaagtcgcagtgaaccgagatcacactactgtacttcagcctgagtggcagagtgaaaccctgtctcaaaaaaaaaaaaaattaattaagcaattatgaaaggagttcaaagaagttacagaatgaaagggctgggtgcggtgggtcactcctgtaatcccagcactttgggaggctgaggtgggccgatcaccttaggtcaggagtttgagaccagactggccaaaattgcaaaaccccatctctactaaaaatacaaaaaaaattagtggggcgtggtggctggcacctgtaatcccagctacgcaggaggctgaggcaggaaaatcacttgaacccgggaggtggaggttgccaatagccaagatcaagccgctgcactccagcctgggagacagagcaagactccatctaagaaaaaaaaaaagaaaaagaaaaaggtatatttaagtgatggaacgatattctcttccgtctacacctccattcccctgtagccatcagcattcactgcttcaaggaaaggatgatagaggtgaaaatcttctgtgttataagaaccaacctgggcttctgagtttcacatacccaaggcctagaagattcatggtataaagttcatgccatcaacagtgatttggaggaacagatggagatccaggctacctactccaatctggactgaggggtgtctctggacccagcaagacgtgggcacaaaggaagagagtacacgagcgtggacatgcagcgtgcaggccacacccctgagagagggcgcagaggctgcctgcccaccctgccccagcaaagggaccagcagatctgaagaggccctgcagccaggaccgggaagactccccaggagccagcaggaaggctccccaggagccaggtggggtctcagcacatggtggcccagataaatggcaactagcagccccagcatcacgttggcctctggaacttaggtgcagtgaggaaaggcaggaggaggcattctgcattcactcagattaagtttctgccattgggcagaatggggactcaaaatagaaattaagtgtggtgatataaaaataaaagttagtcttttacacttctgagttaaggctttaagtatatgaagatctaaatacattccaaatgttttactaggatgttttgaaatatcatatctttcttgtaccagaaaaactgtaagctgccttcttaacatcatgactagaaaaaatatgtcattgttcatgaggctgagcacacattagataacaggtagacattttaaccataccgctggaggattaaaatagtactttggtatatgcccaacataaatgcatacttatattcagtaaaaggcatgttctagaatgttcatggtagcactattttttttttttttttttttttggagacagagtcttgctctgtcacccaggctggagtgcagtggcaagatctcggctcgctgcaacctctgcctcctgggttcaaatgattctcctgtcttagcctccgcagtatttgggattatacatgtgtgccaccatgcctggcaaatttttgtatttttagtagagacagggtttctccatgttgggcaggctggtcttgaacttttgacctcaagtgatccacctgcttcgacctcccaaagtgttgggattacaggcatgagccaccacgcccggccagcagcactttttgtaatagtcaaaatctaaccaactaaatgctcaattaacagtagtgtggacaaataaattgtggtacatcaagcaatggaatagtctacaacaatgagaaggaacaagctacatgcaaaagcatggctacatttcacaaacctaaattgagtaggagaagtcattcacaaaggtcctaatgtactatcccatttacataaagtttaccgcaggcaaaactaacctatcaattagaagtcaggatatggagttagggggcgtggctagtgactaagagcaaatatgaggctggcttttggggagctagtgacattctgtgtctcgatctggctgagaatatgttcagtttgtgaaaattcattgagctgtacacttatgatatccgtaacgttaaaaaaatacaatttaacactcaaaagctactatattagggtgctagctgattttatgccttcaacttgcttaatgttttcatttatatacaatagcattttacaccatgtcagttaagcaatctattgcaaaataacttacagtaaaatcataataaatttatacaaagtattgatttagcattaattttccaactgtgaaagtcaatgaaccataaatctgtaaacaaattggtgaagtgaaaggcataaatgacaacaaaaattagtcactgtgttgtgtatgtgcttttccgatggctataaggggaaaatatatgggacgaggcttcttaaaattttaaattagtgacataaaaataacataatgcacgaagaaatagactatctcaaaattgtgaagaaaaccatcctggaatctggttgataatcttgacatactggtatcacaattcagtttccctgcaagggaaagcatcgtcacactcttgtgcttccaaaaatgttggaggcaaatctatacaacacagtcaatttaattcctagaatatcatgtttctgtttatatgcatatgtttgaatatctttactattttaaaagcccacattgcaggcatcatcttggcaatacaatagtttaggcccccagtggacatttgtatctccttgactatgtgttttatgagtgattgcccagcatgagtttgatcacctgcagtgatgggaatgcaccacctcccaatacatcgtggcctattctgttctagccttggctagttacttagagattatggtgattcttgtagttcagtttctgttttggtcagagaaaaccttttttcgaagactatatttactagacccattgcagctccatctcaatggcatcaactgagcaccagagaccagataagagagtggctaagttggttaagatgccactatcattgcttggagaaaaacataagttcttcatgttgacacacttaattgatagttgctgatatggtttggctctgtgtcccaacccaaatctcatcttgaattgtaatccccaggtgttgagggaagggcctggtgggaggtgattggatcaggggggtggtttcccccatgctgttctcgtgatagtgagtgagttctcccaagaactgatggttttataagggactctttgctcttcgcttcctctctcctgccgcaatgtaagatgtgcctgctttcccttctgccacgattgtaagtttcctgaggcatccccagccatgcagaactgtgggtcaattaaatctctttcctttatagattacccagtcttggatatttctttatagcagtatgaaaatggactaatacagttgctgtcttcattaggtactgttagtgtaaaaaaaaaaatcagtctttatttggaatattatgtcataaggctgtacaatcacattaagagttctgtgattcaactgagtggattagtttaggtttagttcatgtgaccaccacgaacccagaggccagaggaatgggatgcattaggcctagtcatgtgttataaagggccagtggtagtatcctatcagattgtgttgactgtgagagagtgagcagtggatcccaaaggaaaattagggctgtgaccagatcactgggaatgtagtacagactgtgcactgcacaagtccaaggtcaccattcacatagtctgcaatgtgattggcatcccttggagttgtgcagtgcacaacctgtgcagctatatgcagtaacccttggtgtgactcagaaagggaataataaatgctttagaggcaaattacaaatgtccactattctgactggctacatttgcttatctagttgttcccaaaaggcttcagacaatatttatgatccccactcttatttatttatcaggtctatgtcctgtctctgcaacagtagttttcgactctttttttcctgctacaatatacataaagaatgatttttatgtaagtttgtacctaggataggtataatcctaaagtgtgttttggatctaatcctttgtcactcactcaagaaagcaaatatgtggagccgggcaccatggctcacacctgtaatcccagcactttgggaggttgaggcaggcagatcacctgagaccaggagtttgagaccagcctggccaatatggtgaaatgccacctctactaaaattacaaaaattagccgggcatggtggcacacgcctgtaatcctagctactcaagaggctgaggcaggagtgttgcttgagcctgggaagtggaggttgcagtgagccgagatcacaccactgcactccagacagggtacagagtgagactccatctccaaaaaaagagagagagagagagagaaagaaaaaaaagaaagaaaggaaaaaagaaaggaaaggaaaggaaaggaaaggaaagaaagaaagaaagaaagaaagaaagaaagaaagaaagaaagaaagaaaagaaagaaagggaaaaagaaagaaagaaagaaaggaagaaagaaagaaagaaagagaaagaaagatatgtgccaggcatggtggctcacacctgtaatcccagcactttgggaggctgagacaggaggatcacttgagccaggaggttttggctgcagtgaaccaagatcatgccactgtacttcagcctgggcagagtgagacctgtctaaaaaatcataataataaatgtaggagtgtaaattagataaaccattgttggaagacagtgtgatgattcctcaaagacctaaaaacagaaatactatttgactcagcaatcctattattaggtgtataccccccaaaaatataaatcattccattataaagacacgtgcatgcatatgttcattgcagcactattcaccatagcaaagacaaggaatcaacctaaatgcccatcagtaatagactggataaagaatatgtggtacatatataccttggaataccatgcagccataaaaaaagactgagatcggctgggtaaggtagctcatgcctgtaatcccagaactttgggaggccgaggtggatggatcacctgaggtcaggagttcaagaccagcctggtcaacatggtgaaaccccgtctctactaaaaatacaaaaattagccaagtgtggtggtgggcacctgtaataccagctactcaggaggttgaggcaggagaattgcttcagcctgggaggcagaggttgcagtgagccaagattgtgacattgcactccagcctgggaaacaagagcatacctccatctcaaaaaagaaaaacaaaaggttaaattaaaaacggtgcaggttttatatttttttcaataaaactataaaatcctagtgcagaagttgtcaactcagcctcatgcctctaggcagaaccataattaagttatgctagacaggtaattgtccattccagtgagtctataacaagttcagtaaaccattcctataacaatttttcatcagaaacttctttatttggtctaattcaagtattttccgttcagtttaatttaatttcatctgactttctgttacatataggaatttattctactgtagaaaattatgtaataaatgtccttgcaccgtcatttcattttattcatgatcatcctgataagaaaacatggcttcattacatagtcagcattaatattatttgtacatattaactgtattttctttcttttatgttatgagagtataatgatttactattacattgctcactttattgataactgtatatggtacagtattttgacaaggcaaaaatgatcttcatgcatttatctataacctctgactatatgatggtatagtaatttcagctcatatagatgacttatgttgagttaaattattaaagaatgttgaaatgtagcagccaacaaacatatgaaaaaatgttcaacatcactaatcattaaagaagcaaatcaaaggcacaatgagataccatctcataccagtcagaagggctattattattattaatttttttttgagacagggtctcccaggctttgtcacccaggctggagtacggtggtgtgaacatggctcactgcaacctcgacctcctgggctccagcgatcctcccatgtcagctgcttgtagctgggacttacaggcatgtgacactatgcccagctaatttttgtattttttagagatgggatcttgccatgttgcccaggctggtcttgaacccctgagctcaagccatccacccacctcggcctcccaaagtgctgggattacaggcatgagccaccatgcttatcccagaatggctattacgaaaaagtcaaaaaataataaatgctggcaggcagggcgcagtggctcacacctgtaatcccagcactttgggaggctggggtaggcagattgcctgagttcaggagtttgagaccagcctggacaacatggtgaaatgccgtctctactaaaataccaaacattagccgggcatggtggcgtgcacctgtagtcccagctactcgggaggctgaggcaggagaattgcttgaaccgcggtggcagaggttgcagtaagctgagattgcaccactgcacttcagcctgggtgacagagtgagactcagtctcaaaaaaaaaaaaaagatgctggcaaagctcctatgttcactgcagcactattcacgatatcaaagacatggaatcaacctaggtgcccatctatgacggattaggtaaagaacatgtggtacgtacattcactactacacagccataaaaaagaatgaaatcatgtcctttccagcagcatggatgcagctggaggtcatcatcctaagcaaatcaaggcaggaacaaaaaaccaaataccacatgctctcacttgtaagtggaagctgaacattggatacacacggacagaaagatgtgaacaataggccaggcagtggctctcacctgtaatcccaacactttgggaggccgaggtggtcagatcacctgaggtcaggagttcaagaccagcctggccaacatggtgaaacaccgtctctacaaaaaatacaaaaattagccaggggtggtgatgtgtgcctgtagccccagctactcgggtggctgaggcacgagaattgcttgaaccagggaggtggaggttgcagtgagccaagatcgcaccactgcactctagcctgggtgaagagactctgtctcaaataaatacattaaataaataaataaataaatggaaacaatagacactggagactgttgggtggtgggagggagcagggcaggagctgaaaaactacctataggatactatgttcattatatgggtgatgggatcaatcataccccaaacctcagcatcacacaatataccaaggtaacaaacctgcacatgttcccctggtattcaaaataaaagttgaaaaaagaaaagaatgttgaaatgtatgtagaccagagcacatgataatgcacggttgtctccaagatttcaagtgacctgtcattttcctggtgtttaattgttgttggtatctggcacagtatttagtactcagtgtagaaatgagcatgaataatactctggtcactgtgcatctctcattcataaaatgccccttaaagggcgggcacgatggctcacgcctgtaatcctagcactttgggaggccgaggtgggcagatcacttgaggccaggagttcgagaccagcctggccaacatggccagaccctgtctctactaaaaatacaaaaattagctgggcgtggtcgtgggtgcctgtaatcccagctacttgggaggctgaggcaggagaaccgcttgaacctggaaggtggaggttgcagtgagctgagattgcatcactgcactccagcctgggtgatagtgacactctgtctcaaaacatacagaaatttaaaaaattaaataaataaaatacgccttaaaagtgaggcagtctcgtctcttatctgtctggacatcattctaccctgcattctccttccctaccacactgaaccactggtagcgccagaaaacctgaatatttcatgttagcaaggatgggttcttatcacagcaggcctgtcagagagatggggaaatatgccaggtgataggcacacaagtatgggcaacgggaatgtcgagagatgagactaaaagggccacgtagtgaagggccttgaatttcacacaagagagttcggattgaatccttaagaattaatggaagcattatgaagggagactaaaaaagcattgtgcggatttagattttagctctctacaggcgagtagtagaatgggaggggtggggtggggaggaatgaatggcaaaggcttaatttaagacaatgaagtgaaaggggtggaaatgtgaattatcaaaggatagaataaagaggatttcccagcactttgggaggctggggagggcggatcatgaggtcaggagatcgagaccatcctggctaacatggtgaaaccccgtctctactaaaaatacaaaaaattggccgagcatggtggcgggcgcctgtggtctcagctacctgggaggctgaggcaggagaatggcgtgaactcgggaggcggagcttgcagtgagccaagattgcaccactgcactccaacctgggagacagagagagactccgtctcaaaaaaaaaaaaaaaaaaaagaggattgggtcgttgattgaacatgcaaggaaaaaaaaagataaggatgagttccagtttcttttcttttctttctttccttttttttttttgtttgagaccaggtcttgctctgttatccaggctggagtgagtgcagtggggcaatcatagttcactgcagccttgagctcctgggctcaagggaatccccctgcgttggcctccaataatgttgggattacaggtgtgaaccaccacacccggccccagtttctggggcgcattgtgatcccagagactgctccattatactgcctctctaagagtcattctatttagggtgttttcactgaatcagacatgattcttggttggaagtaacagaagccatctctggctgtcttaagaagtatttatgaaaggtctgtgagagagtgctagctgttatttaatttctattctgtcctttttactcaggaaagagtagaaatgttccagtaagaacccttggcacataagaccactttccccagcctcccttgcagctaggtctagccatgtgactaagttctggccagtgggatataaacagaagtaatgtgtgcaacttcccacacttatccttttttttgtttttgagacagggtctcactccatcatccaggctggagtgcagaggcacagtctcagctgactgcaacctctgccccaccctgtagctcaagcgatcctcacacctcagcctcctaagtagctgggactacaagtgcgtgccaccatgcctggctattttttttttttttttgagataagagtctcattctgtcgcccaggctggagtgacatggtgtgatcttgtctcactgcaacctctgcctcccaggttcaagtgattctcctgccttagccttccaagtagctgggttacaggtgtgtgccaccacacctggatgatttttgtatttttagtagagatggggtttcaccatgttgcccagattgctcttgaattcctgagctcaagtaatccacctacctcggcttcccaaagtgctgagattataggcgacagccactgcacccagcctaaacttatccttaaagggtgaaggtatatacttcttcctttttcccattacttatgtgatggctgcagctccatcttggaccatgaggaagtccataccttggggatggcaaagcagacagagtattctgggttccagatcaaccacagcatcctaaaatgcctatgttcaaacttttatgtgaaagagaaataaacttgtgccttaagtatccattatttttggtttctgttacatgcaacagaacccgtatctcaataacacaggtaggcatcagagactaaccaaaatgacagaaggctagagagctttgaatacagttggatacaggggcgccatggagatgaggcagcagagactgcccagcctcagtaccacgctcctgctgctgggagcaatctgactcccaggtggccccagtctggttcactcactcaagatgcaaaatcctggtagggagcagtttattgctcaaattgggtcatgtgtctcctccttaggggcaccaaaggtcagctggaggaaggacctagccctctgcttctgtattgggcatgagcattgggagttgtgttccagggatagcccatgcattaacaaaacatacaacaggaaattctttccaagggaagattgagctgctgataggaagggggaaggggagaatgctggacagccagaaaaacacaacatatgtctactacatttaacttcttatccatactgaatcatggcaaattaagagaggctttcattatttattttcccatttaacttaaagctttcttatttcagtggacccattttgccttaaaacattgcaattttctttcacagtaccctttaagtggcacacattacttctaaattctgttgcaagcaaagatattcacaggctgcttatagtactcatatgctataccttcctttttggcaatagaatcatggaaaataatggcaacattgtataaaagctacaatcaaaattctgtcctgggatctttaaaatacttcttaagaatagcaggagtattttctatatataaaaagaaatcttaccaactaaaatgttactggtatcctttcaaaagctagtatcaatcttggcaatcctgtattttaacatgacatttttattgcatttcagaaaaaaaaaggtcacaaagaattcgatctctcaatttatttgaaaaagaaattaaactattcatcattaacaggaagactatcagacgggcccaaagtgcagttgttgaaaatgagcattttttgtaatcagttcagtctcattactctcctgttgtagttatctgacaatttctggaaaatgactcttaatacttgttttttaaatgtgtccaaaattagtaatactagctgagatgccaataatttgcaaataagccttactgttgctcaaaattaagaaaccattcacagtcacaccaagtaaaacatctagtttgtagctctagtattttcattaaaatacttcacagatagaaacaaaactttcttcttccctctctcttcctttctttcctcttaatcaaatctgagttaatagttaaacacgaagttttgcaaccatttcctttttctttctttctttcttttttttttgagacggggtcttgctctgtcacccaggctgcagtgcaggggtgcgatcttggctcactgcaacctctgccccctgggttcaagtgattctcctgcctcagcctcccgagtagctgggactacaggtgcctgccaccaggtccggctaatttttgtatttttagtagagacagggtttcaccatattggccaggctggtctccaactcctgagtttgtgatctgcccgcctcggccgctcaaagtgctgggattacaggcgtaagccaccgcgcctagccattttgcagcgatttctaatgaaaaatcatgtgcctgttagagcaagaattgtttaaatatttgtctattatgctaacgaagaaatgtaaagaatgtggaaattagccctgtggttcctccttgaagagctggtgtctgtttgtgttttatgttctattatgcaattgtagccgctctgaccactggctccattttaacagagtgatcttttatacaggcttttcacactgaagatcaagaagctacaaagctggtaacaaactgatatttctttaattgatcatgttaagcattgtcagattatccaccacaagcaatatttttatttcatttgtgacataaattgtggcaaatgttacgtctctataaaaattgatgtcgaatttgaacaggtaatagatgcacatgatataaagtgaaagacatataaaaaagagtatacaatagaaagtttccacctcccatctttgtcacccagtcatctaattccccttcctaaaaacgccagcttcacatgtatcattgctgatattatctgagcatatactaacacgttttaagatagtatcggccaggcatggtggctcatgcctgtaatcccagcactttgggaggccgaggcgggcagatcacgaggtcaggagatagagaccatcctggccaacatgatgaaaaccctgtctctactaaaacacaaaaaaattagcttggcgtggtggcgtgcacctgcagtcccaactactcgggaagctgaggcagaagaatggcttgaacctgggaggcggaggttgcagtgaaccaagatcatgccactgcactccaacctggcaagagagcaagactctgtctcaagaaaaaaataataataataataaaataaattaattaaataaaatagtctcctttggcctggtgtgtggttcatgcttgtaatcctagcactttgggaggctgaggcgggaggatcacttgaggcgaggagttcaagaccttgaggcgaggagttcaagaccagcctaggcaactagtgagatcctgcctctacaagaaatttttaaaaaattagacgggtgtggtggcttgtgcctgcagtcccagatattggagggactgaagtgggaagattatttgagcccaggagttcaaggctgcagtgagctctgatcacaccactgcattccagcctgggcaacaaagagagattctgtatcttaaaaaaacaaaacaaaacaaaaaaaaaaacaaaaacctctctctttttttttaatgaaaatataccatactaaatacaattttttttttcagatggagtatcactctgttgcccaggctggagtgcagtggtacagtctcagctcactgcaacctcctcctcctgggttcaagcgatacccccaccttagcctccccagtagctggaatcataagtgtgcaccatcacgcccagctaattttttttttttttttttgagatggagttttggtcttgttgcccaggctggagtgcagtggtgcaatcttagatcactgcaacctctgcctcccggattcaagtgattctcctgcctcagcctcccgagtagctggaattacagacgcctatcaccacgcctggctaatttttgtatttttagttgagacagggtttcaccatgttggccaggctggtctcgaacttctgacctcaggtgatccacccacttcggcctccccaagtgctgggattagaggtgtgagccactgctggctaatttttgtatcttcagtagagacggggcttcaccatattggccaggctggtcttgaactcctgacctcaagcgatccacctgccttggcctcctaaagtgctagtattacaggcatgagccaccgtgctcagcgaaacatacattctttcacctccttttttttttccacttaatatacctaggaaatgtttcatagtcattgtaatgaatttaaaatggctgcaaaaatctttatcattctccccaaagagtttatttcccctccctttgaatctgtgtggcccagtgtctgcttacccaatagaatgcagcaaaagtaaccttgtggtagttccagactttagaaggactgacagcttctgtttccaacctcttggaatacttgctcttgaaatgggtgttctgggggaatgcagccccctgtgtcagaggtccaagtgtcatgaaggcatcatagtgtgaggaagcccaagtgagtcctgtagagaggctgcatggagagtgacagagattgtttcctggctagtttgtagctattccatctactaagacacaagacaacatgaatgaagaagccacctcggacgtgcgttctagttgagctttggatgactctttttccaaccaccatcatgttgcagttatgtgaaagactctaagagataattggccaggtacagtggctcatgcctgtaatcccagcactttgggaggcgtaggtgggtggatcacctgaggccaggagttcgagaccagcctggccaacatggtgaaaccctgtctctactaaaaatacaaaaaattagccgggctttgtggcaggcacgtgtaatcccagctactcaggaggctgaggcaggagaatcacctgaacctgggaggcggaggttgcagtgagccgagactacgccattgtactccagcctgggcaacaagagcaaaactccatctcaaaaagaaaaaaagaaagttatttggtttaatcttcacaataacattgggaggtaggtgtcattagcctcagttaattaatgaggaaaaagcaagcatgatatcacataatagtattaaataatttcattcccggaaaactgaacaaatcacccaggtttgcacatttctacctccatttttaagtgttcctaattcttagttctcaatttactatccaaattcttttttttttttttttttttttttgagatggagtttcgctcttgttgccccggctggaatgcattagtgtgatctcggctcaccgcaacctccgcctcctgggttgaagtgattctcccgcctcagcctcctaagtagctgggattacaggcatgcaccaccacgtctcgctaattttgtatttttagtagagatggggtttctccatgttggtcaggctgatgtcgaactcctgacctcaggtgatccatctgcctcggcctcccaaagtgctgggattacaggcgtgagtcactgcgccaggccccaaattcttaaatcaggaacatagtggcaaataatggcattaacaagtcattaatgttagtatatttgtcttaaatcctagtgatctggttgtaatttgttaatagatttatttgtcatatttctttttctcctgattttttttcttttctttttcttcttttcatatagaggatactcttttttatttattttttcttttttgagacaaggtcttgctccgttgcccaggctggagcccagtggcgtgatcatggctcactgcagcctcaacttcccagacttaatcaatcctcttgtctcagcctcccatgtagcagagactacaggtacagcaccaccatgcttggctaatttttttaaatttttagtacaaagtctctctatgtttcccaggctggtcttgaaatcctgaggtcaggcaatcctcccacttcagcctctcaaagtgctgggattacgggtgtgagccactgcacctggtgagaataaaattttaaaccaatatgaaaggaaaataaagcactgatgtgagaaatggacattgttagcaacagtacagaaagcatgacattttgttaagtatcatatttgccatttattatttactttattagttatttatttgaggctgggcgcagtggcacacgactgtaatcccagcactttgggaggctgaggcgggtggactgcctgaggtcaggagttggaaaccagcctggccaacatagtgaaaccttgtctctattaaaaatacaaaattagccaggcatggtgatgcatgcctgtaatcccagctactcgggaggctgaagcgggagaatcgcttgaacccaggaggcagaggttgcggtgagcccagattgttccattgcactccagcctgggcaacaagagtggaactttgtctcaaaaaaaaaaaattttttttgatttataatgggtcagcaggtggtaaaatagtttaaaatctacaaatgtaaaatgatctgggaataaaaaatcaactaagatatttgtgctagagaatcattattcaatgtagtgttcaataaagtaattagaactttagttgggaaaaatcatgtaattgtttaaaacagtaaatgcaaacaacaactaaaagtctacgagcttgttggattgcatatggtaaggtgctagtttgcatagtttctaaagctctaggatgtggactggaacacattgaagatttgagcaagcagatgctttatatatcctgggatagttctgtcaccaagtgtctccttcacatctgtccgttcgtttccattctcgatgctactgtcctattttggctccttatgctttctcccacagtctatggtaataatcttttaattggtctctctttctgggagcttttccttttctgacttctttgcgcagaccttcagattaatattaatacagttctcttcagttgttcttcacaacctcttgaatgaaatccaagcttcttagtgaagtattgaaaatccactatgaattctagcctcactcactgtctggcctgaataactcatgtctcctgaggcctcagagccctgagggtaaaaacaatggatttggctggatgtggtgtctcacacctggcctcactcccagcactttgggaggctgaggcaggaggattgcttgagcccaggagttcaagaccagcctcagaaatatagtgaggcctcatctctcaaaaaaattatctgggcatgatcatgcatgtctgtagtcccagctatttgggaggctgagctgagaggatcgcttgatcccaggaggcagaggtggcaggtgagccaagatcgtgccactgcactccaccctgggcaacagagcaagaccctgtctcaaaaaaataaaaaaataaaacatgacggattcactcttacagaaataggcgacttcattgaaaccaggacagaaagacactaaggcacacagtgctcagaacggcatgctgacaagatctctggtgggaggccattgcctggacacctgctgggttttgtcctggacaccattcagtcacttgagcatgtttggtacccagggtatttttaaataataggcaaaatagaatgagttcttcaaaccttgtggattttatactgaaaacttccagagatatatcttaggtaattataagaccaagcacaacaacaacaacaaaatcctatcttgaatccatcagttgcagatttcatggctgactacatcaagaggaagctgcaagctctaaaagctggaaggccagtcaatatcaggaactcctcagaagtgaaggaaaagcagtttaaatttgtttaacacaccatgttttcaaactaactttaatttatgcataagggccattaaatttgttcttttttaaaaggaaacttcttaattggaactaaaccattcattattcactgtgatacaggttatatacccttagtttccatgtgattattcacatgttcagctgacagaaaggagaaaaagctattctaaagacttagcttcgctttggctcactggtttttatctcaatttaacttccaatctcggttacagagagtgttaaagctggaagaaataacattttggtagatggtaaaggataattacgagtcatttcaagttgttgaagctttcattaaataaagcaagctatttgaaatcttaaagctatttaaataaaggactaagacttctgttttatttacttaaaagcttaaaagatactgttgaaaatttaacagttaatctattgtagggtgtggttagacatttattttgacagtgctcactgaaaattcaattatacccccagagtcaaacttgcctgtcatcaaaatgtctaacaatctgagtgttcacggggtaataacaaaccccatactaaacagtttgccagaaatctctcctataacatctaaacggaacaattgggtggttgtctaagacacctaaactcaatatgacatttcagctaaaaagagtgaacttatacctaagcacttcatgcaagttaccaaaagagaagatattctttaataaaaaagtacatttgttgaatcaaagaatctcagtgttgtaagaaatatttgagatcatttcagttaggcttttcatttcttaaatttgaaactgaagctgagattaaacagctaataaaaagacaaagccgatccatgatattggtttgggcaatgatttcttagatatgaccaaaaacgcacatacaacaaatgagattacatcaaactaaagagcttctatacagcaaagaaaacaattaacagagtgaagagtgacaactcacggactgagaaaaaatatttgcaaatcatatgtctgataaagagctaatacacaaaatatacaacaaattcaactcagtaacaataaaacaaataaccctgttaaaaaatgggcaaaagacctggacagatatttctccaaagaagacatacaaatggccagaagagatattaaaaggtgttcaatatcaccattgattaggaaaatgcaaattaaaatgagatttcaccttactcattttagaatggctattacaaaaaaaatgaaagacaagtgttggtgaggatttgaagaaaagagaacacttgtaaaatgttggtgggaatgtaaattagtgcagccattatggaaaacagaagggaggtttctcaaaaataaaaatatataattactatatggcccagaaattctacttctgggtgtatactcaaacgagttaaaatcagtatgttgactagatatcaacacttccatgttcactgcagcattattcacaatagccaagatatggaaacaatctaagtgcatatcaagggatgaatggataaagaaaattatatatacatatttatagtgtatacacacaatggaatactattcagcctttaaaaggataaaattctgtcatttgtgaaaacaaagaaaaatctagaggatattatgtaaagtgaaataagtcaggtacagaaagacaaatacatcatgatctcacttacatgtgaaaagtaaaaaatgtcagactcatagaagtaaagagtagaatgatggttaccagaggctggaggaggcaggatagacagaaaaaagaagattaatttgttaaatggtacgaggttcagctagataggagaaataagtcctagtgatctattgagcaatagggtaattatagttaataataatatattatatatttcaaaattgtggagtatattttaaacactctcaccataaagtagtgataaatatgtgagttgaaagatatgttaattcacctgatataaatgttccacaatgtatacatgtatctaaacatcatattgtatgccataaatacacacaacacttaattatcaaataaaaagttaagatggagctgagccaagaatccaagactctgaatttagatttttcattttctattatgccaaagtgttttctgaaaattaaaattgaatatggcatgtccaaaagaatatgtcataagaagacaggaatggggggattgctgcatataatctcatatttttagtcagttgtgtaagatattattaggagaagaaaatcagatattttaagaaaattcttataactcctgtaacactgaaattttatggcaaacctaaaaacttcaaaatacagagttttttaaaaagtgaatcatatatacgcagtttttattgagattattaaagcaaaatctctcaaagtagcaaaacataagtatatgttttagactgtactatgcagaatagcagaatggtgccaatggcaaaaaatctttcaaaagacataaaaattattgaggtctcatcccagctctactaatctatgtcttagcaacctagtgtaattcctacaagttctgaacactgcgtttaatgtatctgcatggttcccataacattttataaacttcaaatattcacactttataattgaaacaatatacaaactttattattaaataagctatcggatgatattctccatctaccctataaggatactatcttcctgtcagaaaatatctccgatacatatttactccccagatcttttctttttctttttcttttttttgagatggagtctctctctgtcacccaggctggagtgcagtggcaccatcttggctcactgcaagcactccccagatcttaactgtggaatctcccgaccatgtccagtcagtaatccattattagttttgcctcatgtgccctaaccaccttctctttaccttctatttaagccccaaataaaagttactattcttggctcaattctccaaatcctttgaaggtaactggtgacactatagcctttctttatgtgccaccttgtgatccaggcttcctagttatctgtgaatattcacatcaggttacctgcactccatagaggcagcaccaacaaaaaacacaattgggatatacaccacttttagacttttgaatacatgcctcaccttataatgtgtgaactgattattcacttctagacattcaactttcaaacaggtatgctctgtattaaacaccaacatcctccttccctttcactgaagggacatcgagaaaacaaaaagatgcaatgcaaagttcacacataaggataattatttgtgataatggtgacaatgaatgctatttcttttcctgctcttatgaatttgcaaatgtcctacaaagtgtattaaatgagtctgtgaaagttcatctaagtccctagtattattatttcttaactctctagaaagtcctagccacgtagctcaaagcaaaatagaaaagatccaaatcattcataggacaagtgttaaggcaactttcaattactaaatatatttttagccatttaaaactaaaagaaaagtaacgtctgtaatcccagcactttgagatgctgaggcaggcggaacacaaggtcaggagatcaagaccatcctggctaacacggtgaaaccccatctctactaaaaaaatacaaaaaattagccgggcgtggcggcaggcgcctgtagtcccaactactcaggaggctgaggcaggagaatggcttgaacctgagaggccgagcttgcagtgagccgagatcgcgtcactgcactctagcctgggcaacagagcgaaactccatctcaaaaaaaaaaaaaaaaaaaagtaacaaaactcttttactcctttttatgatttaaattttattttaggtttgaaaagtgagatatatatcacttaacagtcaggaagcgtgtagtaaactcagtctctgaactgacgttacctaaaacagagatgttcgttttctcatactcatctctaaaacagaggtagacagagaaagtgcttctttttccgagactgtaatgaattcaaacctattcattaactttatagcagttattttggtttcacagtgaaacataaaaagttctatcttattggaaagaaaaccaagtagctatctaagtagttgatgagaaggaatttgttctactgttttaagcgcatgagggataaagcaagacttagaaatatttttattagaccatttcattttaatagtattttctattataacagaaatgacctacagtaaaataattcaaaatacccttacttctgaaggttatttccacataaaattgtaacattactatgatctaaatttaaataaaattttctattgatgttaaaagtttgataatatacagtttgttaaagtggtttggtcactatttgggtatgatcgacttcaaaccataggtgtttaaatgaaccaaagtctttggtttatttctatagctttttgtctagtttgattaataactagtataccagtcattcacatatagtcataactggccaaccaaggtttacttggtaggagggtgacagtttaccctttaataccacctgattaaaatacacaagatgttctacacaaataacaacaaattgtttatttctaagaacataattttccttttataggaagctctcaacattaatctggagtcacattttaattttataatgtaataattcaataaatggtcattagatattgggttatttggaaaattgcaaaaaatcaaacttctgacaatgtcctttaaaataatgaactcagctggaaatagttaaacaagacttaaaaatacaaatcataatggccgggcgtggtggcttacgcctgtaatcccagcattttgggaggctgaggcaggcggatcacgaggtcaggagatcgagaccacggtgaatccccgtctctactaaaaatacaaaaaaacttagccgggagcagtagcaggtgcctgtagtcccagctacttgggaggctgaggccagagaatggcatgaacccgggaggcggaacttgcagtgaaccaagatcacgccactgcactccagcctggggcgacagagcgagactccgtctcaaaaaaaaaaaaaaaaaaggaaacacaaatcataacgtgaatattcaaatgattgtacagtgtaacaactgtatgcaaataattaagaacagtgactataataaaaaagtttaatagatttgacatcaacatttaaagaatataacttacatatacgaaaataagccatcaaaacttgaagctgtcaaattgtgaaaaacagtagtaaacaataaaaatcacttactcattggaaacactgcaaaatgtcatgaaatcatttcagaaatgaaggtacattaatgaaaaataatcatagttttcaattcagtctcacctcacctttaagaagcagtgtaaaacagcaataaatgggataatttatattactgcaataaaatgcaaatatatatattgtgtactagcaccctctcttcaatgtatagtttaacccaatagctttctaccactggaaatttatcataagaaaataatggtggcttacacctataataccagcactctggtaggctgaggcaataatgtcagttgagcctaggagttccagatcagcctgggcaacatagcgggattctgtctctaccaaaaaaaaaaaaaaaatgctagtcatagtggctggtacctgaatccttgctgcttgggagactcatatgaacctaggctgatttgagcaggagtatcatttgagcacaggaggtcaagtctgcagtgagctatgatcattccatcgctgcagcctgggtgacagagcaagaccctgtcacacacaaaaaagaaaataattcagaatgcgcacaaaaatatataaatatatttctgaaagctgcatttgtaatactgcaaaatcaatgccacattgagacagggtaccaagattaaggtagagtcaccaatgacaattaaaatctggagtcagaatgctgtatctaagtgtgacaacagtttctctgctgcagcctaccactaccatgcagcaaagttgctctattacttctgaattttccacattctgaaagaaaagcagaaaatccagtttctaagacaaaaatcaagttacaagtattgacggaaaaatcacttttaaataattgtaaacagtaacaacacactataacagtaaatctaattcagcctgataccaggctgtaccaatagatataatgaaactgcataatattggtaaagcaattgtatggtagaaaaatactggcataaaaatgttcatagcaagttcacaaatggaaaaagtaatgttttatttaaataaaaaggagctaaatgaattgcagacaactacaaattaatagtttatacctttcaattttagaattaacgatatatttttctttattttttgagttttcattattgtgatgtattatgctgaaattagcaaaaaaaaaaaaaaaagagtaactatctgactgatacagaaatttgtaatgagaagtaaggtgtgtccctaacaaacccacctatgagtcagtttgaaggtaacaagaaaatttttatcacagtcggggagaatgggaacctgtgatatgtggcagtgacatattgttaacactgtgcactgagctgacttcagaagtatttgtgtacctaatgatttccagtgtcatcaaacgtaggtaagaacactgagtattagcactggttgatatttggtctctacaatagtgagtatggtggttaattttagatgtcaacttgaatggactaagggttgcctaggtagctagcaaaacctattaaagtattatttaatatagtattgtagaatatacattaaatacattatgttacatgtattataatgtaacacattataatatattaaagacattattacgttaatacagcacttagtatagtattacttaatacattaaaatggtaactaagcttgatgaatccctgagcaaagccagttagacctcataagcaacctctcaaccttgcttgctttgcaaacataaacaaaacttcaggtattttttgtaaatgcctatatgaaagaaaaacagaactttctttttctttccaaataggagtgtttactatagttttcctgttcctgtatcacattacacactgtgtgtgggagagcagagagatttaacttacaagttttagatcaagagagcataaccagatcccaggttaagacttaacactacagaatactcatattagtaatacttgtcttataaaaagatatactcttcactgtaattgctgcaaacaatactgtaaaataatatgcagtgtgtttgtgaaaggtcaataacatgcttatatttttgctgttgaaaaactacacaaaagcaaatgactagaacagtagatcaattagtatcagtagaattataccatcaaacattccactgagcttgaatgtaagatctgacataaccagataattccatggcagggcaataaactgcatttacattctctttctaacaattagtgcaagcatatccagataatctatattgattctacattatcttagagtgaaatcacctaataacttcttcagtagtctttcttttaatttttatcctaattatccgtctgaaaatgatcttttaaattgggaaaactctgattaccttacatccttcagttcagagtagcattgggtaaagacattttggctgcagacaaatcactctttcatagtcatcagctttcagaacattctaaggcttcattttccatctaaacttttcagttaatttgactctaacttttaattgatgttactgagcagcaaaggagcctgaaggacactgctttgttttgaaaaatgaagaaagaaaggaatgtaaatcctgtaaatgtaattctaatgaaatcaagatacaatatagtgtttataaaatgaaatacaattatttctaataactgtactttcatttcaaataattttcaacaagttagtgacgtagaataaatacaattccagaagaatccaggattttttttctattgcattgctttttattaaattatagctacttgaaggctttgaaaaattgaacaccagtaaaactgcccttcttttgttaatatgttttgttttcttgtttcatttttaattcaactagtcattcaccagaaaaaatttactcaggtaaacttttttgattatcctttcatagcatttaacgcaagtgttatttgttgtagtcttttgtctatgaatctattaatgctaagaaactgaacattcctaggagtgtcctaataagaaagaaaaattaacaatttcagctgtatttttacttaaataaatattcatatagtttacctttcaggatcacaacaaacactttgattatataagaaggtctttgtatatacatcagactaccaagaagtcatatctgattttgtgcttttctactactcttcccccaaacacttgttcaaaaagtttacttttaaagggtctgaactgtgtgtcaagcactgacatcagcatgttacctgaattaactcattaaactcttgtgatactcatgtggtattagcagtgaagaaactgaagcacagaagcttcaagtaaaatgtccggttttagagcaactgaacagtagagtatggaagcccagttactgaccttgtaccattgcccagtactgtgaactgacctaaaaaggcctatgagatatcaacccattaagatccatgacataaagaaaattgtttgtcctacaatatcccaatctggatgaaggcacataaagagaatatgcttaagcatgatgacaaaaaaataagaaagaactgtgaatgcactttacaaaacagaaaagaacacaagggactttggaaccaagttgaaaattaaatatgttcatgtgcacataacaaaagagtgatcataaataaactgtgtcaacactgtactatgaaggtgaaacttcctttttaggattagctaaaccttgtataacttgtaaaaaaatgcaaccacatatgttgatgtactaaacccagtgttttcttttggcttatataccaaaaacaggaattccttcctgtaatgaagaaaaaacacaggcatcaaggagtaacaaaattaatgtcttagaatgtaaaatatagaaacaccaattaaggctcttttttttttttttacataatacatgtgaaaactgcatcagaatttacaaaaaatctacagcgtaatttgttctggcaataaccaatcacattctgctggaggtaactttagtaacgtcaagcaaaagtcttaaaattatgacaggtggcattcatttaaaatactctcaagagctcttagaaatcaagaacacaggagctgcggcggtggcggtgcaggaggccgggcaggggtgcggagggaccgacggacgcacgggcgggcggccgggagccatggagcgcggccctggggcccgggggcgcgggccggggtgggcttcccacggcacgacatggagacctgtggttgcgaggctccctggggctcggcttggaccgcgatggggctgggccctggcctcctaacggggctgctgtctggggcggtagctgcgggggcgctctcccctctgcccgcgactcggagcacccccacccctcccctgccgggccaggccgggcggcgttgttggcgggggccccggtggaggcccggcccaggcggcgcccgccatgaacgggctgtcgttgagtgagctctgctgcctcttctgctgcccgccctgccccggccgcatcgctgccaagctcgccttcctgccgccggaggccacctacaccctggtgcctgagcccaagccggggcctggtggggccgggaccgcccccttggggaccctgcgggcctcctcgggcgcaccgcacccgggcgcaggaagctgcacctgacggagcataccgacttccagtacagccagcgcgagctggacaccatcgaggtcttccccaccaagagcgccagcggcaaccgcgtctcctgcatgtatgttcgctgcgtgcctggtgccagcttctacattggcctgggctcccgcctccactgcaacatcttctcctacgactactccggctacgatgccagctcgggcaggccttccgagaggaacctctatgccgacatcgacgccgcctggcaggccctgcgcaccaggtgagggcgaccctgggggcagctcagcctgggcacacccaagaggggaccaggccgggggccggggggcgggcttccctgggaggaaggtgggcggccctgcaggaggggagccacagtggatacacagggccagagagcgggacaggcgagcttgggtgtgcaggtgcctcctccacatggctgaggtgtggccaggcggtcctcccacaccctggcctgtggagccaggctccctgggaacccctggcctgaggatgggaaggggctgagcttgtcacaggggcgtggatgccacccggcgggagggagtgggtggtcgtctgggggtctgtgcacgtgtggctgggagcccatcggccgaggcagcacttggggccaagtgaggcgaggctgctgcatccaggtccggaggcctggcccatgaggccctgtggctacggagcttggccatcctggggcagggcctacagggtaaggtgcagactcgcagcacacatccgaggtctgggccagcctcgattccagatccagccctcctagtcatccacgtccccagccctgcgcttgcctgggcccttcaccggtgtttgagcaccgcccgggccagtgctgctttggacgaggagacccaggtgggcctctggtggcttttcctgctcgccatccactggggctgtctcgtcctggcccagcccagcccactggtctgacctgctcccgcagggaccaggcacagctctgagaagtcagaggccctagggaggtggggtcatcgttgccttggtgatatgcaggcagtccctgctgtgggcctgggagctggtcccctggcaccaccctggctctgggggcctcccagcagtgtgggacgctgacaccaatcaccacttcatgcgacttccttggcccctcctgtctctactgcctgggccactggcagagtcacacctgccatggccacctctgagctctgtctgctcggccatctgtcctgctgccactttgtcctgcaggaacctaggcccagagctgtgagggggaggccagagcgtgcccagggcctccactggggatgtgtcctgttcgtttgagtggtgacatccaggtggcagctgggggctcctgcctgtagcaggtgacagggctgggctggctcagcacactactgaccatggctgccagggagcaggccagggaggctgaggcagagctggaaccacaggcacaagccaggcagcatcctttggggcatgggtgagtggcgagctgtggagtgctgccaggaggctgggattccaggccagggacggggacagccctgctggtggagtccaaatgccaggcagaggggatgcacacctgcccatgctcctgccttgcaagagggcatctgcctgggatcagagcctagagcctgtgggaggagagttgtggggtcccggcatgggcagggtggcaggtgggtcccgcgtggttgggactgggcacgaggaggccttgtaactggtgctggatcagctgggtcaggggccacacaccaatgacctggggatgggggtggccctgggtgggagctggtagtgctgaggtggctgaggacctgtccactcccaagggaaggtgctggtgggaggaccacctccgcagccaccaccctcgatgctgacctgggttgcactggcatctcattgggcgtggggactccgagagtccaaaattgggtggagacatttggggacacagctgcctgaattcctcatggccaagggggtgggcaagggctgcagggaggaagtgtccgctgtcctggccagtgcaccaggaacggctttctaacccgggcaggaaggcgtgaagcattcaggatgtgggggccacacagttcccagtgtgcacctaggggtgaccaggaggaggaaaggcgccagggcctcccctacccccgccccaggggcactccgtaggcgagatccctgcagatcctagctaggaaacgccagtgaacggcagcgcagggaacggggcggggccgctggcttcgcccaccgccgcggtgttgggggctgggggtggccctcgggactggtgtggagcctgggcctgacccactgacttggctgagtggggagactggagggtcgcatccggagctgggcccggggacgcccgctggtgggaagggtgtgcgcgcgtcggaggccgcggctgaccctgctccggcgctgccaggtacggcatcagcccggacagcatcatcctgtaccggcagagcatcggcacggtgcccaccgtggacctggcctcgcgctacgagtgtgccgcggtggtgctgcactcgccgctcacctcgggcatgcgcgtcgccttccctgacaccaagacgacctactgcttcgacgccttccctaagtgagcggcccgggcggggacggaggcggggcggggacggaggcggggcggggcccgggccgggcgctaagtctcacccgctccacgcccctcccgcagcatcgagaaggtgtcctagatcacgtcgcccgtgctcatcatccacggcacggaggacgaggtgatcgacttctcgcacgggctggcgctctacgagcgctgccccaaggcggtggagccgctgtgggtggagggcgccgggcacaacgacatcgagctctacagccagtacctggagcgcctgcgtcgcttcatctcccaggagctgcccagccagcgcgcctagcggcggccccaaccggccggacctcagcaataaggcggcccccggacctcaccccgcgccggccccccaggggctgcatgtggaccccccgggcggcccgggggaccccgccccgacccaggggctgtggacgatgtacaggcaacagagctacgcactcctttccttttggaagcaagaagaaaatacgtgaaaacggaaattaaagatttaaaattaaaaaaaaaaaaagaaatcaagaacacaatatctggacccttgatttgaatccacaatcagtgtctttctaactgggaaattttggacaaagttttaaactttcctgaacataaaatgcctagctagcaataactttagaaaatactaggagtttgtaaagttacaagaatcaaatgagttaataaatgtaatgtaaagtaataactggcacaaaataattataacataattcattattattttttaatatctaaattctctagcttatagttattttgaacagataaatatatacaattaaaatttctaatatgtgtttttgattacttatcatgtagaaaaatatagttttccagatgaaaatatagtatctaatgtagaagtcacaaataatatttattaaactggaatgatatcattttaaattattttggagctcattaaagtaagtctgcactggccaactttttatttattaattaaatttttgcctagcacagttaatctccttttctaagacttaattcccaaatctatagtctttcttttcccatttggagatgagtgggagtactattcctttcttgcccatccctttctctattttcattataataaccaatatgcccttgcctaagcatatgcccccagttaaaaatacagattcactgtactgtttcaccaaatttaacctgttatttctggaaatagggtgtttaaaaatgggtttgttatttcttaatacatgccaaatgtcatcagtatatcgtggtccagatgtattctaaataccaattgaaaaacattcgtaaagctaagaacacacaacatatttcactgagtgaacaactgtgagaagcctggggattgtaggcattcttggaaaactattatttttttttgcatgtgtgttacaagcatttgcataggttatatgttttatagctctagttataaaaatagagaataaattacattccctcacatctgtacaaaatagcaagaatacacatctacagaagtttaaagtatttactttttttagttaatacgtttcagaaccttaaagagagcaaatcataatacccattgattataatgtcacattttagttattacattattacatttacttattataacttttagaattttaggaggaaaacaataattttgagtgtgaaatttgaatatttgcaccctaaaaatttccaattccgttttcaataatttagtagaatgtttcttagagaaataagaagacaattaaaaacatgaagtactaggttttcaagtatattgcaaagccataaataatatataatctatcagtggtacaataattaatatattttttcaattatattaagttgtaagaactcaatgctcctaaaatttttaaataatactatataaaatcaactcaaatgatatcagctcaaattcatgcatgcatctttgcagctaaagtcctttaaaattaaaaataatttaaaattttgtcatatttatgaacccattttaaagaacataacatgtcatacaaatgttaatttaatacataatgcattagtaaaaactgttctgtatacatatgtttatgttagaaaactatttttaaacagcaattagattctattgtttcatcaaattactaaatcacaacattgctaaactcaatttttactctcctaaacatattggaatctatgagaatatacagtagagataataatttgaatagaatttaacttatatgttttagcaaagaaataaaaactggaatattatgggtttctaacatgcctatttgtttgttagttgtctttttaaaaatttctttatagaagcattttgagtgaagcccacagattatttaataacttattagttattcaaaaaagtctgtccttgttggcaatgtggaaaacaccatagagcaggggtcgcccaccccaggagctgcagaccagttacctgctcatggcctgttaggaactgggcctcacagcaggtggtgacctgcgggacaggtaatgctgggtggcattaccacctgagctccgcctcctgtcagaactcagagcggcattagattctcataggaccaggaaccctactgttaactgcgcatgtgaggaatatatgttgcacactccttatgagaatctaataactaatgcctgatgatgtaaagtggaagagtttcacatacccccatccccacaacccactcacccagccatccctggtctgtgaaaaattttcttccacaaaactggtccctggtgccaaaaagtttggggaatgctgtgttaaggtgaaaaagggtacatgtggtaattgtaaaaaaaaaaaagttcgataaatataggaaaaaactctaacatcatatgtatatgtggacatatatacttacatatacatgattttctgatttgaagaatgtataaaaaatgagaaaatgacattgaaaacctttttaaggatcattcatagttaaatatactctcgctctctctatatgtatatataatatatataatatataatatatggtatatatttattatatacatataatatatggtatatatttattatatacatataatatataatatagtatatattatatacatatatgtatataagtatatattatatatttatatacatatattatatatttcatataacatatatttatatatgtatatattatatataattatatatttatatatgtatatattatatataattatatattcatatatgtatatataatatataatacatattttatatatattatatatatacattttatatagacagggtctcactatgttgctcaggctcactctagctcaagtgatccagtcttggcctcccaaagtgctgggattacgggcataagccactgtgcctggcccatagttaaatatcttaagtcaaaactgatcattctacttcctttctcttcctcgcttcattcttgaaaggaattcaacactgaaaaagaggtggagacttaactgagtcattcacaaataagaactttagaaaagtgaaaaaacatagttatataaatcatttccaatgatttgttcatctttaaaacataggccaatatttctactttacccaactttactcagctgtaggatgcagtccagaaacatcttagtgtaagagtattttttcataaaatgtaagataatttatttaaattgaatggctgatcaaccataagaattccactgtaaagtaaccaaagaagtacaattcttacaaaacaatcatgaaatacttttaagaattaaagaaaaagtaatcacttttcaccaagaatcaaacttttagttggcatagcataaaataatttctcacactggcaaaagaaaaacctccagaaacctgcaggcaaatgtcctctccccactcccactcctaaagaaaatacgggctgaaccgaggcaccatgatctctcttgcctcttggatttgctctctgtaccacaaagctgtcttctagtctaatcccactcataaagctgagcaaatggcataccaagaaatggcataccaagacagaggatctaacatgtgtttgacctttctgaagcatctcaagtccctggattccacctcctgttctccgtattttcaaacatgttctcgaacatgggtttgacctttccgaagtatcgctagtccctggattccacctcctattctatatattttgtaatgttaatgtccagtttcattgttaaaatgtgagtttctacccaagttgtttcttatttgtacctgaagactttgaataggctctggcactcccagacatgggatatcaaacagatgcaggccttaagtaggtcataggactggacttacatacaagtggctgtggcttgtgagactaggttgtagtggtttttttgttgttgttgttctgttttttcattttgtctaaggacttgaaaaccttcaggggagacgtgtgttaagatttgtcttctagtgatcttcttttaaaacacaaatcaatcctgttaaggaatccattaaattactattagtgcgaatggacttttttaggtagcatggatgaattcaatgtaaatgcaaatgtagtatgtggaagaagagccattctcattctatgaacataggacagggatgagaatatatataacctatagttaatgaaaaatatatatttctgatttatgtgaaatcaatttaagagattacatatatatattctatagatatatgattttcatcagagcacagaggatgaagagagaagagaaaagataggagtggtggctactagatcctcttgggggattatttttaaaaaggcagttttttgccaataaatgggcactaacaccttccaatagatatccattggcttgcagaaaaaaaagtgtcaaaaaatttatcattggagaaaagtcaatgtttccattagtattaatgtggctaaagatggctcaagggtaaaattattcaaaatactatgcatcacaatagtgccaccctgtggactactctctctctcaccctatggggaaagaggctatgtgaaaggaaaatgaatttctagagcagcaaaacaaaattctttattttttttacatagaaattgattgtgtttgctatcagtgatgtaattattttacaaagaagcccttgaactatggcagaaattctggatgctctgtcactatgtgtcaatctcaatatatcaatcataacgcgtgtgatttggggttaatatgaagcaaaaacaaacttctcttaggttaagtatattttccgagatttaaactagtttcctaatttttttccccaggtttccaaattcttagtgtaacaccaaccaaatatcaaaagagattattagagtttcaataaaataaataaaattaaagaataagtttataattcacattattccattacatgcattattagagaggacatttcattaaagcatgcaagctgcattttttttaaatttcgacatgtagatagtttaaactagaagccagccaacactttgatatagcataagacaactgggaaatgtcagttgactaaagtggttatttgaagaaaataagcaaacacaatattctttttgtctattgatatgtgatgctgtactgttattgggcaaactttttaattaatagaaaactctaatgcttatgatgacaaaaacacgttctgtaaaatagcactgtatatgaaaataggacaaaagggggaaattagaactctgaaaccacagtgtcaatgaacatcacacagattgaagatcacagtaatgaatgaccaacatctttaggctggaaagagtgggaaaaattaagaatttcatggagatgttattttcaaaaataaactcaataaaatcaccaaactcaccattgggttcagaatgtaaccaatcatctctttcacttttatgttacctttgtggagttttattaatggaaatgaagaaatttactagaaaaacatgattgtaggcactgttaaatttactttctctttgtataatttcatgagtgacctgaactgctttgcagcatcagtagggaaaaagataaatatatgaaattaaaaggtgagaataaatttaaaaagtttttatctctccagtgagaaagtgataatcataatgtttagttaaagctatcatctaaccaaatccatcagtacactgattttttaacttgagattttaataatgctgaagcatttccgtcacctcagtattagtgcttccttgtttaaatctcaaagggccaccatccaaggctgcaaatatacaaatgataaaattttggtatttaagaatacccatcttctaataggacagccatgacaataataatggcattgatagaagaaaacaagaaaatttcaagaagataaatactagggaaagtttttagattaacatgcaagtatgataccctccctcacaaaaatcttcattaacactaagcctgtaaatttcatagaatacttcttgaactaggagaactggaatcactcatcctgttagaatgcaattaattggaacctcttgaaccagtatcttgtgtgttaggagttgtaaatctcaactgttaagcatcttcaggcactaaacaagatctgaatactaacgggttcatttatttcactgattactgtatgcagatatgaaattccaggcactgatttttcattaaaccactctcttaaggttaacttggctctctcttttcacctatgaatccatatgcttgccacgaaaattgtaatattgatttttaacatttccccacagttcaaaaatattgtttgcaaaaaatcaagggccttttctaacaattcatgtaattcctgttattagctaatgtgtaagagtagggaacaattaaacatactgtatacaaaatcttaccatgctgaattgcacccaagatattagttcagtcatccttcaaattacctcacaactaaaaaggatcagatacttaaataaaaacttcaggcaaggtaggaaagaagtcttttatcatccctgtatattgcaaaagtgttccattctctcgaaattcacattatatttattaatgagcagcacatggaaagaaagaaaatgagagaaagagaaagagaaggaaggaaggaaggaaagaaggaaggaaggagagaaggaagagaagaaaagataaagaaggaaagaagtcaggatggtaggaaagtgagagacagaaagagggctagagctagagataacgatgagagagataaaagagataaactctaatgtctttgatatcccccaatttaaaagagaaggatgtgacccccccccgtttacatataatggaacaagccaagtctccatttactacatgtggacagtaagaaaacttgcatggggaaaacttttggggggaaatgaaggtgatttccgagctgctactgcagttgtatatgacactgacatttatttcctataattcttgcccacaggaaacacatcctataagaaactgaataaaatcaagtttgacattctcataatctgcaaggcatcaagttccctgagaagctcacattcccccaaaacacacacatatatgtaaggagcaagacattcaggcgatgagctgtgaaaggtacttccacattgtgtgggtgccaaggatttggttattcctgaacctgaatccaaaaagcgggggtggggtgtgcgatgacaaatgagggtgagaagaatgtttccatgaaaccagacacccttttggaatctaggctgagaatcaggatcccacccccttgcctaccgccaggctccagtaagcaacctctggcgtcctcccctctgctccttccgcagcagcagacatagggatcccgagtagccagagagcttaggtcccgccgagagctcctgccaagcgcttctctctcgactagttatcaattgagaaaaaaaggatcagagacacataaggatggtgatcaaaatccagtgtcaggcaccaggttcccagaaggttccagctcctcttctacgcccttacccagctcttttcgcctggcaaagggtcacccagggagcccccagcagcagatccttcccttttatagcaccaatcttcgccgccactgccacactgcgcgcccgctatccactcaccgcacaccgagaaggcctggcggagacagcgcagggggaggagggtggattaaaaggatagatttttggaagggtaagggagaaaaactttgatgttgtacccacacacagaactgagaagaaaccaaaacaagttgtagcttcaggagcggggaggacgctttcgccagctcaaaaaaaaaaaaaaaaaaattcaccccctaccaaatcagggggaggaagcttcctgttccttgagcgatcaccgagcgcacctcgcaatctctgatcttcgaacccactgaaaaagcacaaggcatggggagtcctgttggttcacgccccgggtgcgaataccaaaagcaactcccgctggaaagcctgcaggaaactcgagacaaagacagaggcaaacgcaacgctgggaagagccaggggtgctgccgtctgcaaaagcagagacgcgtctcccttcgggcaaagtgactgctacaaagtctgttccctcctgcgcagggacagagacatttaaaggcctgaacggacgtcagcaccagtagagctcgctgggtgagcgccaggcctccccgccccaaggatagcgcgcacagggcgatctgctgctcgcgaggtagaaagtggcttacttggggagaaaacagagctggtggcgctgctgagtgtcaaaccctggagcccatcgtcaagacgttatattggtggcagttctgctgtgagtgcacttgccgaattgaacagagccagagctgcgtggagagaggtctggccactctgtgcgcgcacacccaatattggcttaccaaggaactcaacacctggtttttagaaagaaacacttttctctttagctctggtttgagtcagtattctgattcgtttctcagttagttgaaatccatcaagatgtcttttacaagaaagggattagactttcccgttcttgaaattccaatcaagataatacttaatctttccttaagccccactgtctacttcctaactcagagtcacaatggatgaaagtattcaagtgtcttcaaatgaccattaccctgcattctaagacgatttgcatactttgacgccctttagtaactgcaaattatattttttcaagttcgtttgccagctggcttcagatcaggttcagtcaatgaaagctggtgtgtaggaaatcggccggtgcccaaagggtaacagctaggttgttcctcctcctttgcctctgctatgggtgacatctacaccattacctgtcctctaaatggttctagtttccatcagggaacgctggctccttgtctttagtagcttgaccttccccctttatactttcaacctgtttctgattataatttgatttctcatatagagtaatcagagggagacaatttactgatttcaaccaattactattctctatattttatttatttatcatactataagactgcattttatgtgtgttttaagcatgattcagccactcaaaatttgacaaaagcagcattggtagcttccaaaaggaaggtcagatcctgctgtgtggtaaactaattaacatgagatctacgacctacaggcttagggttttactttgatgactgttatttttataattctgagtatcagtgttcaacatatttgatggctatcctcatcaaatgatcctaatttattcattcacttattcatgtactctttgaaaatatgtattgacatcttctgtatccctgtcctcatacatatctcagttttgttgcaacagaggaaagcatatggtgaaacaaggagttggccccttcttgacaacttgtgcagatacaagtgctttgaatggggaagagactgggaatgcaattttcttagtgtggtgagctattctgcaatattataacagattcaatatttaaagagctgcaactcaaaatgaataagataaattgaagtgttgtgatttaagtgcaaattaaactctccaaaacatcaaaatacaggttttgcatgtaattaacaaagcaaagagagactgtaaatcttatgtggtaattagattggtccatggtaaaactgaggtagctggtaatttatttttctatgttgggaaagaaatttaaaaacaaatatagtaaacagcaattaatgttttatgatttgtaaataaagttatatttttaagattgaagcctctcttaccattctcgaagagccatttcaagccttgaatctctcagggcttcagtttgaattattataactttccagtttgagaacatttttcatttattcaacacttaaattgtatgagattatattttcaggaacaattatgtttattttttatatgaaataaaagtggacaaaatattaactcataattttaaaactgttattacaacaaatacaaggcatattataattgtcaataaaaagagaagtgcctgtaaaattataataaatcattcaaatatcttaaaagcaaaatgcataaaaggtagaatgtatatattttcatttgaatgactgttttttaattaaaagaaataacaggattcttaaaacattcaattagaaactacggattttcagcttttcccgattctattagaaatgtaaaacaaaataaatttaaattcaaaaacatgacggacccttcataatgtattctgcctactcattccatgtcacttctaatttctcccttcatacaaaatatgttgaaatcatactaaatctttgccttctgtgcttttattgtaacacactccatcatctttgcagttgcaattttctgttcatataatttgccttcttccattttatggcttagcatctttttatctttcttggatcatctaaggtttagctttcttgtggaaatctacattggctgcacttcctagatattcccattgggcgttgatatcctcttatagcacttcctccactacgatgtgttgccacacttactaacatagctaacctgttacacagtaagaactgttaggggagagttaggataaaaagactaaagtgggtagagttagggtttgggttacaatactagctgtatcttgatttgctagcatagcatacatactagtcaacaagtatatatgtattgagtatatctataaataaatcaataacttttaaaacatggacctttggtttctatcttataaaaagcttccctaaaatgtatgaaaggtctcactgactttatgaaatatacattgctctgatttcttatttatttttatttatttatttattttgagacagagtccctctgtcgcccaggctggagtgcagtgtcacaatcttggctcactgcaacctccgtctcctgtgttcaagcaattctcctgcctcagcctcccgagtagctgagattacaggcacatgccatcacaccagctaatttttatatttttagtagagatggggtttcaccatgttggccaggctggtctcaaactcctggcctcgtaatccgcctgccttggcctctcaaagtgctgggattgcaggtgtgagtcaccgtgcctggccccttgctctgatcttagtcttcttaagctctggtccttaacatttgagaatgtctgacaggacccatgaattttatttttttaaaacttgtatatgcccaaaatttgcatgcagtttgtatggaattttgcaaaatgtatggaaatcctgaagtctggttttttttttttttttttttggcagggtctcattctgtcacccagactgggatgtggtggtgttatcgtagcttactgtaaccttcaactactgggctcaagcaatcctccaggctcagcctctgagtagctaagattaaaggcatgtgacaccatgcccagcttattttattttatttttttcagagacaaaatcttgcattaaagcccaatctggtctcaaactcctgtcctcaagtgatcctcctgtctaggcctattaatcccaaagggctgggattccaaacatcagcagctgtgctcaaccttgaggttctggctgtaatctggctgttatttatcgaaacaacagaagttcttggtattaacagtcattcttcttcagagagtcaccccacaagactcagatgaatatagttaagaagccaaaatgaggtcattatggcagaacagaattgatagtgcacattaaaagacattacacactttgggtgattcaactaaatcatagtctgaaatgcagttacaaagtggtaatgttcaaacgatcatctattagtcaaagttacaagaaaagtcctggttatgttggtaaaaattgtatctgtgattatccatcttcaaatgatttgttaaatgtttattaagataaaaaagttacatttcaaaagtatttatattatttgtcaattcctccataacaaattatcccaaaataaagtataataatgaaattttaaaaaaagatgagaaacatattcttcaccacaaaaaaaaaaaaaacctttattatctcgaagtttctgtggtgcaggaatctgggcatggcttaactgggtcttctattcagagactctcacaagttataatcaatctcactcacatgcttgatggtatattcagtactttgacagctgttgtccagaattccatataatgtgagcctcttcagtatgggaaggtttcttcatcaaaatgtgcgaagccaaaaaaaaaagccattgaaaagagtccaagacagaagtcacatcttttgtcaactaatcacagaatcaacctctcatcatgtttgctgtattctgtgcaacagcagcaagcctatggatccagctgacacccatggggagggtattagacaagggttggaatcccaggagatggagaccattagaaactacattaatctgctgattacagtagtttgccaaagaatcctgagataataattctgggctcaaagttcttatgaggcactgaggcaggacaataaagtaacagaaaataatactatattaattttaatgatttactaatactaatatactggtataatgtactaaaatagtatactacatttttggtaatttgtccaggagtaatagaaacaaatccaaatattaaatatcaaagcatattataattctatgataattaactctgtaatttaaaaagtctaatataggaatataccaaaaaagaaagctttaacaatatacgttattgcctaatatatcaaaatggagccttcacatatgaaattagtaaaatatttttgacctaataatttcatttttagcttttctctaagaagtcatattgtttgcaaaaatgttatgtaccaaggagtttataacatgcagttgtagtcaggaaaaattttaaattaaaaatgtgcaataaatatatgtaaaaacagaataatataggcatctaaatagccctatataaaaaggcaaacataaaattacaaattagcattaaccaaaaatatgctctgaagtacatcccttgattgaatttacttaagtttcttttggaaaaaaataaaaataattgtatttgctagtaagagaaggtagaacattatttgcccatttgttttcagaagtaaagcaagacatttatgttttcagaagtaaaacaaatacaatattttctaagtaataaggttgagacaagaaaaaaccagcaatgagtcaaaatgtctatttacattcttttacaggaaaacaagacttagctactttcttccaaaaaaaaatttaagtagaaatgttactgttttactaaaagtaaatacattttacatacttctctcataattttaatctggagttcagttatggtgatcatattagtcagtgttttccagagagacagaaccaataggagaaagagacagggagatgaaataaggcattgtttagcatgattatgggggaaaagacatcccaagatctgcagtcagcaatctggagactcaggagagatggtggcatagctccagtgtgaaagctggcaggcaggtttgacactcaatgaaagccaaagtttcagtttgagtccaaaggtgggaagaaaccaatgtcccatctcaatgctttcaggtaggaggaagttccttcttactcctaggaaactcagccttcttattctattcaagacttccactgattgatgggacccacccacatcattggggaagtctactttactcagtctacgaattcaatacagaaaaagatacaaataagatatcatttaaatttttaaaaaatcattgctaatcaaaatgtagcattttaattgtgtttttagagttttgtaagtgtccttaatttttcagcttattcttaaaaaatcaatttcactttattcaaaattcccttttggaaaacattaaatgctggcccatataatcttagactttacatgctttttgataaatataacattaaaagtagcatgtgtagtcatttaaattacacatataagatgtacatatattattctccagaggaaataaaactgttaagaactctgatttaggtagggttctccagagaaacagaactgatagaagatgtgtgtgtgtgtgtgtgtgtgtgtgtgtgtgtatagacagagagcgagagaagaagtgaagagaagacatttattaggagaattggcttatctgatttcagaggctaagaagtctcataataggccacgtgcaagctggagaaccaagaaacttgttagcatggctcagtccaaatccagaggcctttccagactttaccactaatcaacgcattatatttagaaaggtatcatagtaagtctctatttcaatttaaaattctctattttcagtgacaatgaaggacaaaggatcaaattttataattattgtgaaaagagattatagagaaagggcctggataataccaaaaatagaagaaccatccatctggggcagagaatcagcagtgatattacttgaaatatggaaattaatagtatgtatggttgagtttaagatctaaaacataaaagttaaatctaaatctaaaatatgtgatttaactctctagaatatatctactcaattatatgaaacaagcgggctgattctcaatactttatcaataataaaggtttttccaaatattattgaagaaatatcaaagtgtctaaaaaacaaagccttagaccatgaaccatagagaaaaagaaaaggtttgccataaaaagtgaataacctttttattcccagttgtgatgtgttcatacaaaccattagcactttcatttcagtgaattatgccagttcttgctttaccttgtcaagattatatatatgattatataagccaaacatgcttccaagctgtaactcacacgaaaataataaagactgtgaatgaactgactatattttatacaaaacaaaatcatacacttattttagatttgaaaatatttgggcaataggttaattggatctcttttcagtgtttgggatgtgtgtgcatacgaatgagtgtatgtctttgtgtgtcatcagctcaacctaccttgaagaaaaaatatgataaagtaaataaataaaatatatattatcagaagtcggtagagataaaaagtacaaaatttgatgaaggtctctgtcttgtttatcattacatgagaaaggaaaaacttgtaatataagacaaaaattattttttatagtagctatttttgaacactgctctgctcaacaattttgcatccattaaaataaatatgagaatcaaatatttcaaagcaatgctataaaatactataggcatgggcaaggacttcatgtctaaaacaccaaaagcaatggcaacaaaagccaaaattgacaaatgggatctaattaaactaaagagcttctgcacagcaaaagaaactaccatcagagtgaacaggcaacctacaaaatgggagaaagttttcgcaacctactcatctgacaaagggctaatatccacaatctacaatgaactcaaacaaatttacgaggaaaaaaacaaacaaccccatcaaaaagtgggcaaaggatatgaacagacacttctcaaaagaggacatttatgcagccaaaagacacatgaaaaaatgctcatcatcactggccatcagagaaatgcaaatcaaaaccacaatgagataccatctcacaccagttagaatggcaatcattaaaaagtcaggaaacaacaggtgctggagaggatgtggagaaataggaacacttttacactgttggtgggactgtaaactagttcgaccattgtggaagtcagtgtggcgattcctcagggatctagaactagaaatactgtttgacccagcaaccccattactgggtatttacccaaaggactataaatcatgctgctataaagacacatgcacacgtatgtttattgcggcactattcacaatagcaaagacttggaaccaacccaaatgtccaacaatgatagactggattaagaaaatgtggcacttatacaccatggaatactatgcagccatacaaaatgatgagttcatgtcctttgtagggacatggatgaaattggaaatcatcattctcagtaaactatcgcaaggacaaaaaaagaaacaccacatgttctcactcatagatgggaattgaacaatgagaacacatggacacaggaaggggaacatcacactctggggactgttgtggggtgggggaagtggggagggatagcattaggagatatacctaatgctaaatgacaagttaatgggtgcagcacaccagcatggcacatgtatacatatgtaactaacctgcacattgtgcacatgtaccctaaaacttaaagtacgataataataaaaaataaaataaagttttaaaataaaataaaatatttgtatgtagaaatttgttgatgccctcctcagcatcctgtccatgtcttattttatatcagcacaattcacaattgcaaaaacatgtaatgagcccacatgtccatcaataagtagattaagaaattgtgatataaataaataaatacataaatatatgggaatactagtcagccataaaacgaaaaaaataatgggattcacagcaacctggatggaatcagagactattattctaagtgaagtaacgtcagaatggaaaaccaaacatcgtatgccctcgctcgtatgcgggaactaagctatgaggatgcaaaggcattagactactataatggactttggggacttgggagaaagggtgtggggcgtgaggaataaaagactacaaattggatagtgtatactgcacaggtgttgggtgcatcaaaatctcactaatcacctctaaaggacttactcttataatcaaacaccacctgttccctaaaaacctatggaaataaaataaaatgaagaaattttgtgtatgcataccacatattttttaacttttttcacaggttcattgagatataatttatatattatttaattcactcatataaagtataaaattcaattttttagtgcattaactgggtgaatatgcaatcaccacaatataattttagaacatttttatgctccttaaaagaaaccttgcacccattagcaatctttcctcattttccccactctttctttaaacctctcccagccttaggcaaccatccatctacttcctaaggatttgcctattctggaaggatttgcccatcctggacatttcatgtaagcggaatcataataatatatagttacgtgcgactcactactttcacttaccatgttttcaatgtttatcctttttggagcatgtattaatacctttttctttttcattgccaagtaatattatattttatggacaggccacattttattactctactcctcaattgatgaacatttctgttgtttcctactttttgttgctataaatacttgtatgctactttttgtgtagacgtttgttttaatttttttagtgtacacataggagtgaattactgagtcacgtggtaattctatacttaaccttttgaagaactgtttcatttttctgcatgttgcctgccaattatctcagcaccatatattgaagagtgtcctttccccactttatgttttgtttgctttatcaaatatcagatctgtagattgtttggggtagcattgagattttgacaatattattttttgaattcataaatataggatatttttctatttgtcacttccaaattctttcatcaatgtgctataattttcagtatacacatctttcacacccttcattaaaattactccttagtattttatttacttatatatttgttttgttgctactataaatgtaattactttattaatttatttttcggatagtttgtcatgggtgtttagaaacaagaatactatttgtatgttaattttgtaactctcaactttattgaatgtgtttatcagctttaacaggttttttcggtggagtctaagattttctttacattaggattacattttcagaaaacagagacaatctcaccccttcctttcctatttggatgcctttcatttctttgccttgtataattaccctggctagtagattacatacaatgttttcagcatctgtaatttgacatcaaatccatccattgtaatacactgattttcacttttcaacttaaaaacctggacatttatcactactctccctttctcttggcctagtccttatttaaaaaaaaaacctaccaatctaaactaggatatttatttttctataatacaatttcaaaggcattttaaaaatttaacaatttttaaactttctatgtcaatgattttaaactgcggtctctcaaaacaaatccaatacctttagtaggaaaaattatgttaattcctacactatcattgggttgagccaagagttgatattaatagatatgcttatttattaccttgttctaacagttgtagtgtaagtcttgaaaatcaagtaaaaatttgtaaagattgtaattgcacaaactccctctcatgagtcacacagttaatccaaaatattatttctaaattataaagccaacaagtaaatacaatgtagtgtttaaaaataatcctaataagtatattctagaagtgaaacattaattgatactatttattgaatatctcctatttatttacatagaaacaaaggaaaagcatattatgtaacattcaaatgactaaaaatacttgagatagcattgctaaatgctatgtaaatgctgacaaaagtaaaaatgccattcgctacatttgctaaatatattgtgacacattataagtattttaaagatatatcactaatgcttgggtcaagtgggcaaaaatgattctaagtatttaattgcggaaaaatttagtacagaggatagtattcaagtgatggaaaaatttaaagtggaactcagagattagaagcagcaggaagttttaataacgtaccaggtgcagtgtataggatacaagacagaactgcaggtaaagtctgactctttccagcatagctaggagacatggctaactccacctgtcccccaggccttacctagaagttgagcagctccaaaccaggtaaacagaacaattttccaaagtcaatcaatttatgacgttaaagcacttctaaaatttaacctctgacttaaattagacaaaatggataaattttgatgattttttttaccaatgattttaacactgtctttatttcccaaagattactgaagtcatgtgaaataaaaggcattggagattctatttttctgacaaaatatttaagagccgtccttttcttctaagccaagtaattagggctcctttacatatccaacacatacacaacacttctagacaggagaagatctagcagttgtaagtttttctttctcattttatgaaccctagcacaacttccacagaccatctatgacatgaactttctgacttttcctgtatttccctctttcataattagtcattctactttaggacaagaatttgccatacaagatcctctctcatataacatttctttccttcataacttttttaccataaatacatcttcatatccacaactttctttagatctctctccccgactgatttctgatgcccaaccaaacctaaaaggtcagataacgcaaaacaaaacagaggagagccttagattttgagagagacctgtctgcctgaagttcttggggttccatgaggacaacagaggtttctcctaaaatgggttttgtagcaccttctgtttttctttaaggagtcccaggctgtcagaaattaccgtagatcctctcatgtgggcactgagtggcaacaagacagactagggaacagtggcaacaagacagacaactgagcagaaaaagaaaaacttactacagtccccactgtaaagatggataaactgaggcaccaggcagtttaaaaattcatgttacatagagtttggctccacagctcactctcttaaccatcctgtaattttgctgaatctatgcccagtcactgatgcacctgtatggtacctcatggcccccttagagcttagaacctgggtttcatttctgctctacagctatagaatttaacaattttcctctgaatttgttggattctaaccctatatttctaaaattttattaatattactgaatcttaaagggagctgtgatgtctttagtctttagaaatattaaatctataaacaaaggactatatgaagttaaactgtattcaaatttctacatgctttaaaacattgaggcaacgtattaagaaacacacctaagaaactgcaaccaatctactctggacaaaaatttagatactatctcttcaaaataagctacctagtggtatttatacatattcttccaacagtatcttacatgctcatagccttaaaaataactaaagtgtcagaattataggcattacacatttctgttggcttgaaaaatgatacaaaatgcataaacctctagagtgatcagtttaataaaagagttcataccaaaggtaataatactaggaatcaaagagggctaaacactgcaggttcttaaaggcaaaagttaataaaaccttgtttttggttgtgaatgtttaccttacaacattagacacatgattcttcccctttctttttcctcttgcaaagatgtggtgatgaaccctttgctcatgcagatgacaatactcttgaaaatggtggcagaaaaaaaaatgaagggaatatggttcaattaatcatctcataaattagaacttattacccctgtgactcttgcatagctccagaaaaaaatatgtgagagagatgaaatggctgtttgctaccaatattttgtgatgcttcattttttgattccttgaataacacattagtccatttatgccagaggttgcaattttttgaatttttgcataagtgaaaaatcagaccttgccgatgacatttaacagtaagatataagtaatttccacatgcttagcatggaacactaggcataagtgggttgacacaattatgaaaacatggctattcaagtaactaattatacaactgattttttttcctcatctctaaaacatagtaaaggatcagttatttaaaaaacacaacagtgacaagtattttatttttaactcagttttggtttgttaaggccattgcttggcataaaaatacaaaaacaggaggagaaacaagaatacaaacatgaaatagaagcagtagcaaaagaaaatgaagaggaacaagaaaatgagaagaaaatacacaatggaagaaaggaaaaagaacaggtgtgggaattagaaggcctatcatatgacactttttatcccctgctcgattcataaaatttgagtaactccaagagtatcacaacaaaaaacaagcaaaaggatacataaatagtcaccccctaaattttgttaagaatgagataatgctgccactcacgcctagctcaggcaccagcaggaggagggcactctccagagattgcagaagggggaggactcctctttgtcctaggtgtaccaccaccactgccaccgaggccttcgttacagcacccacaggttcctccccaccccagaacgggatgggccctgcagtgctcctactcccccttcccagcccccagacttcctactgctaccaccactagcgccaatgccaatacaaccagtcaccctcaacgtaccagcccaccctaccaggctcctacctccaggcccccgtgggtgccctcctaccgctccagtcgagctgtggtctccatctccaccaccaactgcatgaggcaagctgcagagccacgtcatctgctccaccgtaccacaggcgactcctccttctcctccttcagcctggcttggagcagctgggcaggcaaagccagaaaagccgaaaacaggactcagggattggaaccattagagcctcacctcgttatgctggtgactgggtgtcagggatcagtttcattgaaggcactcacacccaccttccaaagtccaacccctcctggcaaaagctggccaggaactggggcctggggtgggagtgagtgccttcactgaaaccggcccctggccaagtccagctggccaggaattgctgggcccaccaaggctgccctcctccgggagcctgagtaggagaaactcagacccagccagcgctccccacccaagggctggttcccattcctgacacctccacccacagtgccctgtctcccacttcccccatggtgcatactactccctgcctggtagtcccaggtggtcttcgcaacacaaagcatgagggcaggccgggaaaccacagtgggtgtggaggccctaccatgcaatccagctcgagtggagaaaatcgccttctagagtctggagtccgagaagaggaaaaccatcccttacttggaagctatgagaagaaggaggccactgctgtcactgccactgccacctcctcagctcgtcaatgccgctggcagtgtagcccccatggcacccctaatctgccccctgccactagcagtgtagcccccagatagcacatccaatacatcctacagtttcaggcaatgtaaccccaatatccccccacaaaagcactccccccacacctcagggagcataccacccaatagtgcccacaatctgacccagccacgggcagttcagctcctaatggtgcaccccccagtcacagacagtgcagcacccaacaacgcccctaaaccacccccactgccagcattgtagccccagttaactccacccaacccactccctgctgctggcagtgcagcagaagataacgcccctaatccttccccagccaccagcaatacaagctagtgtacacaatctgcctcccctcaccacccctgccaccacgggcagtatagccccagatagccaagcaacctgccccaccaccagcaatgcaaccccggagagtgcccccaaccagaccactgccacaggcagggtagcctctagcagtgaaccccaataggacacccaacacttgcccccagaggcacacagggcaggccaggaaaactcacctaccccatcacgtttctaccactgtggctaagctgcagtctccgacgtcaccaccaaccacagcgaggcaagccatggtggcacaggttccagcctccagcatgtggcagtgcctcttccttctagtcctccagcctggcaggagaagctcctgctgctgaccgctctcctactgctctatcgccactaccaaccgcagcgaggtagtgacccaggctccaggctccatccatcctccaccctccagcaggtggaaggttgcggcttcttccagttctctaagctggacacagagttgctcctccgctggacacagaagagcctgaaatgacctgacgccacctcagcatgctttatatatgaggttatgcaaatgcagttcctggactacatgttctgattggatgagaaaaaaaacctctaggcctactctgattggactttattttcatgctgtgattggttgtgttaagacttgctctcatccaatcagaacatgatcataaagtccaatcagagtaagcctggaggtttttttctcatccaatcaagacatgcagtccaggaacctccgtgggcattaccgcagtatataaatgatgctgaagcggaaacacgttttttcaagttcctgtatttttatgtggagttgctcactgcccaacgtagaggactaggaatcaggagtcggtggccgtatgctggaggctggagccgcgggagcgcggctcgcctcgctgcggttgttggcagtgacggagagagagcagcgcggctggagcaggtaggagaaggaaaacagttttgggacagatagaggggagtaacgagggtagttagggccaaagggaaaaaaggatagcttagccggagaaggcattgcaaaaagatggcagcgaaaagatggtggggaaaaaagtttttgggtagatggaggtgtaaaaacagggtggggagcgggagggaaggaaggttttgcagaaagacggtgggtaaaaagtttaagggtagatggagggggaaaagagggtggcaggtgggcggaggaaagagagggaggtgatgggggaaaaggggggggaagggagagaaggttttgtgaaaagacagtggggagaaaatatagtgagggggaaaagtttttgggttgaacaaaagagggtagcaagtggcagaaggaaaaagagggtagccagcaggaggaagacaaagttttgtgaaaagacagtggcagaaaagaaagatggtgaagaaagaaaagacggggggtgaaaagtgttttgatagatggaggggggaagaggataatgaggaggaaagagggtggcgacaggtagcagggatgggggttgggaaaacaacggaaaaatagtttggggcagagggaggggaaaaagggtggcaagcaggataggggaaaaaagagcactagtggtaaaggggggagactttgaaaagatggtggggaaagttttggggtgtagatggagggggaaagagggaggtgaatagccgtggggagaaggctttgtgaaaagacggagggaaatgtttttgggtagatggagaagcgaaagagaatggcaaggaggaacggggaaagacgatgaagaaaacagtttttggttggatgaagcagggaaagagggtagtgagcagcaggagtggagagaaggttttgggaaaagacgggggaaaatgtttttgcttagataaaggggcaaaagagggtgatgagagcgggacggggaaaaagagggtggccagggataaggggaaaagagggtgggaagaaactggggaaagggtttgggtagatggatggggaaaagggtgttgagcaggagagtagaggcggctttgtgaaatgagggtgggcaaaaaatgatgaagtttgggggcagatggtgaaagaaaaagggtggtgagagggagggggccaaaggccgtttggaaaagaaggtagggaaataatggtgggggacaaaggtttggggtagatttttttaataagatcatttgtatgtttgcttttcagtagtttgagttctttatgcattttttgtatgaaccccttgcctgatgcatggtttgcaaatacttgcttccattatctgggttctttcatttttattaaattttaattcaatttaattttttttagacggagtctcggtctgtcgcccaggttggagtgcagtggcacgatctccgctcactgccaagctctgcctcctgggttcacgccattttcctgcctcggcctcccgagtagctgggactacaggcgcctgccaccacgccaggacactttttttgtatttttagcagagacggagtttcaccatgttgttagccagtatggtcttgatctcctggcctcatgatcggcgcccctcagcttcccaaagtgctgggtgtacaggggtgagccaccgctccctgcctgttttttcattctactgattgcttcctctgctttgctgaggcgttttttttgtttttgagacggagtcttgctctgtcgcccaggctggaatgcagtagcatggtctcagctcactgcaagctctgactccgggttcacgccattctcctgcctcagcctcgcgagtagctgggactgcaggcgcaggctaccaagcccggctaattttttgtatttttagtggagacggggtttcaccgtgttagccaggatggtctcaatctcgtgaactcatgatctgcctgcctcggcctcaaaaagtgctggggttacaggcgtgagccactgagcccggcctggaaacgtaactttattttttagtgttgtatttgtgcatatactttaatagccctgagttttaataaagttgcttttaaaaaatgtatcttatatttcagaaatacaccctaaggcatgtgattagttgggtggcatgttgtttagtttttacaattgaaggattgtcattcctttgtacaaaaaaaaaaaaaattaaacgtgaatttttatcatatgctagaggaaagaaggcagatactaaataataaatattgtatgcttccacgtaaataaaatttgaaattatataaagacaatgcattaaacttttctggggttgaagtggggaattcactggcaaaggtcttgcaataaatgtgtaggtgaagggaatattctatatttgattgtgtaggtggttatctagctttataaatttgtaaaactgaactggactaaaatgtgtgccttatacgcagattattctataaaactgattaaaactagttagagaatcagtcaaggggaaaagaaagaaaaggcacgtgaaaaaatgccaatgcactagaattatctttgatgacattaaatatagcctggtcttctcttaattctttttaaaatttacgtagatttctcaatcctttgatactttttcctcaacacatcttatattctcatatatgttaatgtatggctacataagagagggctctcttacagttggactggaacagcttgatatttatatctagagatgcatcggaagcataacactgacccgtgagcaagatgaaaatggcatgtgctagttagtgattcctaatgttgctttaagtttagtgccaactggtctacatcgttgagaatgtttagtttgatggtttacacaacttggcttaagaagtatatgaccaacaatgtatgagggagcctgctgtaaagacttttctgcacttccctttaattattatagtaagctcaaatcttgaaggttcataatatacagataaactgtgtccgtgagactgagaaaggatctttagggagaaaggccctgttcctgaaagacagacattcaatgatttcctgcattttatttctgttgtactttacctttacctttattaaacactaataaggtggttcttacagggcctcataggcctttttagttttccaacctattcatacttggtgcaaacctagtaattttttgcgtgatagtgttgggattttactctgaggctaggcttcacactgtaaaaacagctttttggaattgtatcattttcagtcttcccatcgtgttccactgtcccagccacacacacaccagatatgaagactacaagcaaccgcgaaaggtgtaacacatgtatagtagatgtttttacctcttgtaaaatctaaggaaaatatactaaaaatgaaggcatcagtaaaacagtatcattttaggttgacctcgagtatttcaacatcagtctagcttcagaacaatacatttgcaaggggaaatggtgtacttttgtggtttttttacacctgttatttcaattgaaattgaaaaaaactaatttgaactaactataaccataaaaagaaggttttgtcagtattgaaataaaataaaatgcatttgtgggactgacctcaggacgcattttaaatagtcaatactacctctaaatctcattcccccttctctgagcatcagctttattcttattccatctttaatttggcactgacagatacagactcattcttacaacatataccatcagaagtgaaaccttcactctctccaactcttgaaaaatctgagatgcactttgactattctcagatcatggatctattacttggatcaaaaagtattgcacagggaagtagatactatgatctctgacattacagtttcaaggttggagtgagaaagggatagctccctaacgagggagtatcatagaaatgatattttcatggttatacttttgtgaactaggcagacatcccttcatgtcaactacatctctactttgaacagataaatatccatgcatatacaaaattatacagtaacataagcatgacttttcattaaaattttaaccaaaacagtctatttaggtgaataaatatcgatacaggagatagttttgcttgaatgatcttttacccttggggagacatacataaaagaatgtcatactttattatgaaatgactgtccagcatatttatgagtaaactttcataatttctttattgtctaaaataagcacaaaaacccttttagttaattaatatccctttttgatatacggaataaatataagaaaatagcacaaatggtattatgccagcacacagaaaaagtttctgttaaaagtcaatcctgtattttgagaacttgacaaaatcataattgaaaatagtgtgttgtcttacatgcagatgttgtgtagtcagggacatccaaatcaacctacatccaaatatttcacaattagtcttattctgtgaagtattataaaaccacgctctcaggaatataaaagcacaaagggacccaggactccaaatagccatttattcatttcctaaggttaggtacaatgaggactgcattttcaacattatcagggccatacagacattggagcttaaggataagatccaatttcatagcaatctgttaaaggataagccagcgtaatgacccagatgttcaccataataattaccatcttgagtgatgatgctatgaatacaaaggaacactgcatctctaaaataaactacgtttatatgacgagaccaatttgatggaaagaaggcaaactgtgaatggtaattttgttttcattgtgtgtactcatctgaaaatacaatactatataattagaaaacttacaacacaaataagactggaagccttaactttttatatcaaatgttctgcacacaaatatagccttttactgaagatctatggatccaaaatattggtagctataattatgctttgtaaaacagaagctatgaatgccttactacagaaagacacaaagaatcatttccttactcactgctagtagaccccggggcacagcatttcctgcccagatacctgattattaatccagtttttgctaggggtatactaactaactaacggagattggtgtttaaaccagttaatgcaaagaaatgctgtaggaactgaaatattccttttaaattaacaaaagtgttctttctagataaagttacatgaggacccaaatgtataaaagaatgttttgttatatggttttagtactttgttagtgccaggttaaagacatgtggccctagataggataactacagaaaagaatttgtttacctgcttcactagaaatccaacaattaagtcagtaactctattttccaatattcatttcctccattttctcatctttttgattgatggtatcatttcgttatttcattttcattgacatggaattcatttaggctaaaacgactttttgactatttgtatatatatataattttaaaatcaatgaacaatattgtttctctatttccaagattatccctctatattctctaaagtcaataccgtgaaacagtccagatatgagtccaggaatggcagtatgaaatactgtaaaactggaagcaacttagtaggtaatcaatagggaaaatgaaactcaatataattgactctagttaatgtaatgatgcatttattttagatttttcttgcattcctaagtcctgcctggttatagtatattacatgttttatgtattgctggattttgatcgttagcattttgctgaggattttttccatctatttttgttaaagatattgttctgtgtttttgttttctttttttttttttgatgctattgtatggttttgttattagggtaatactagcttcatagaataaactgggaagcgtattctctttttttttggcaagagtttgtaaataattgtattaattcaactttgaaagtttggtagaggcattcttggctagaagatttgttgctgttgtcattgtttcctgaggtggtagttttgattactaaatctctttacttgataagattttatatttctccttgattcatttttgctaatttgaatcttagaatttgtcctgttctttaaaaaatctaaattttagatataattgttcataggtacttttgtaataattttttatgtcttttagtgttcttttaaaaatttcattgatacttgaatagtttctcttgttggtcagtttatgtaaattgtggccacttttgatgtgttcaaagaaacaatttttggctttgttgaggttctcaattgtttttctattttgtatttcactaatttgtatatccctaatacttccttgtggttgctgtagttttaatttgctcttcttttttcagtgccttatggtggcaggttagagaatgttatttttgagtatgagaactacttttattgcatcacgtaagagatattatgcattcttaaagtgttttattttttttaaagtattttctaatttatcttatttcttcttggacccattggttatttaatagcatgtttaatttccacataattctgagtttcccaaattttcctattgctgatttattattttactcagttattgtctgaaaatatactttgtattattccaatgtttaaattcattgaggtctgttttatggcctggggtatggtattcctgggtaatattgcatgtgcacttgagaatctactgttgttaaagtgttccttaaatatctaatcagtctagttattttgtagtattgttcaagtgttctatttctttgttgatcttctgcctagtcattttatccatttgtgaaagtgagtattaaaggctgcaagaagtatgttaaattgtctaatcttcatttttggaggtttctgtgtcaatagattttgaagttttttatcacacacatatatatgcctgtaattgttatttatttttgagatattggcccttttatttttatgaaagctctctttacctctgtaaccccttttgttttaaagtctattttttttctgatattaatataacaattcctgctttcttgtggttactgcctgcatcatataacttttccatcctttttttcctattaattttcatgtttggatctgaagtatgtctcctgcagacaacatgtagatggatcttatttatttaatttgtttttctccagtctgacaatctgtcttttatttgaatatttaaattcattttcacttgaggttactagtatagatttacatccattttacttcagttttctgtataccttatgtcttttcatttctctattcctcctcctttcttttgtattaggtattttttataaaacatttaatctatatttaataatatctatattttttcaatgtttcccttcattgttactttagggtttactgtagacatcacaatcaattttaggtgcataacaattctagtggcatatatgtatatataaattttacttttgttcacttttgtgtactttggctctcctttttgtgctattgctgtacacattacatctatatatgctatatacccaataatttattgttataactgttacttgatgatatggtttgttgttttgtcctctccaaagttcattttgaaacaatttcaatgtgacagcattaagagctggaaccttgaggatatgattaggctattggggtctgtcctcatggatggtatgagtgtcttatagaagggctggagggaattaggaccctttgccttttcatccttttcaccgtatgaaaatacagcattcgtcccctctggaggatgcagtattcaaggcacctcactagacaccaaacctgccagcaaattgatcttaaacttccagcctgcagaactatgagaaataaatttcttctttacaaatttctcagtctctggtatatatatgtatcagcatgaacagactaacatacttgacataattttatgtcttaaaaagataaaaagaaacgtactatgtatttacggcttttgttacattagcagtcttatttattatttcaggtcttttcatttgttcagcatttgaaacttcttcctgacaccagaagggctcttcttagctgtctttttcctgggttattcctggtaaactagctgacctttgtttcaaagcatatgtctctaataaagtgccagtctctcttatttgctttttaccatcacttcattgtttttcaaagtacgcttatggttgaatttccccaaactcttcttttgggaaaagctttacactctctgctctatgttctgccccttcctttgggcaaaacttctgagctttggctctggtgattgtagcaaagagagcagcattctcctctcggagtgacagccctactttgagactgtcactgggatgggaagtagccgttggtaatctcagctttgccactcctggaatgagaactttgccttacagacaaaccagaaagaaggcgatcagggctcagtgttctcagtgtgttgcacccaaacagtccccattccatgaattagagctggtaggaagaagtgacatcctacttcttggccacattccacaaaagcttaatctcaagaacaggtagtggcagcaggtgggggttgaaatgaaaagttcggatgtactgttactcccagaaagatactatagccccccagtggggtctagtaaaagttctgtgttcttggctacattgcattgagtagagtttatgtcaagataggctatgagaaaaagaggtaagaatgggttgtggatcaaatgcaaaaaactcttactgttcttagtgagtttcagtagattttcttgaataaatagttcatcattttctatgtaccattatgacttttcaagtgacataggtgatggttgttttataattttcaacaattttataaaagatccatggagctcttcacattgccattctagaggtggaacttctacatttatttcttaggcaaggaaattaaggttttctttaatttctcttcttctaaaatatgctttggaatctcactctctacagcaaattgggtctcagtatatttctttctccaagagaagtttgctagatactcaaataatttttgttttatattgttatgtttgaaaggttgttttgttgttaaaagacaataggaagatcaacatgaaaccctcacattcattgtatattatcttttcattcagaaagttacaatatatttgagtgctcatgaagctttaaaaagaagtggattaagtaatcaatctccctagacagataaaaaagcacatgatattttggtattccccaactgttgttatttgactttcatgttctagcaaataactttcaacaatttgtcaacttacttgcacatttatattttatattattaattccattatttatgcatgtgttgaatagactttaatatatagagtagatgttgacacactcgaatttgtaacaaagtgaaaaattactttgatacatattttttctgacaaaattatgaagtgcttttccatctcttctaaaacaacatagaaaacatgtttctttctcattattaaatacatgactcggaatacagcaaaattaattggctataaagcaaacctttaaaagagaatagtttgatgaaaaatataagcattcttagttatacataagatcccacagagccaatttaactttttttccagatttatgtcccaatttaaaactttaattcctactgtctaagcattgtggctaaaagtatgagataagtaattactcctgacatccaacttttgtgatcatagtaggtgacattcctttgaaaaaagtaacttgaaaattttctggtaaacgttacgtttgtgtgtgggtgtagagtttcattttcaaaacaagctctcacatatcaaagttaagtgttttaattatcttgtaagactatgtccttggatcctatgctgtatgccaatatttatacatgttgaatatgctttcatttaacttacatagccataatgcttaactttaatcagagattccttactaattctgatgaatgttggtagaaaatatgctgaaaataaaatatgttagaataattttcaatgaaaggataaaaggaaagaagctagcagaagagccagcaccacagaaagcaaagtcacattctggatccaagcaacatttccatgagcaaagaaccagcaaattggattcacgagacagggagcagaagcaagagtgtgaagaggaaattgacttttttttgttttttatttgttttctcatgaggagagtatactagtagtagaaaaaagttacatgactgattccagagagacacaggtagaatatctggaccctctgtataggatagctagtgattatattgtgtgttctggaggtaagatttgtataaattcaagcctacaatagtatcaaggcctattaagcaaacatccattagacagcatgaaagactaagaggctttcaaactacaagtgtcaatagttaaatgtgaagcaagtacatatagacatttgatactatgacaaaataatgagaggtttatcataatataatttaatattttgttcttcagtttagtaattatataaagctacatgctagtttttcacaacttaaccaatcctctttaatatatttttatgaaatttcctgctatacttgggatacagtttagagtgtaaactcattttgtaggattttttttaaaaaatcctgaaacaacatagtgataaatttaaatagttttgccagttgaatcatgtatgtgataaaaaggctttatatttttgattcctaaatcagggtatgacagtacaaatcataaatcaagtattcttatgtccattgtataaatatagaataatgcccaaaccttttttgaatgtgagggtatgtcatgagcatcaaaaggggaaaaaaaagtatgaaaatccctaagagttttactctggaaagtcatatagattgtgcattctttagctgacattttaaaacagatacctgaaatcatttgcttaacccctttgaataatatactattgcctttaagagaaattctgtaatctactaaaggtccttttcgtatagccctgacctctctccagtcacgtgccgttactggtgtctgtgacccaaacacactagttgtctctcgatttcgctaagacgttctgcattctttcttctcacagcttttatgtctattgcttcttcaaggcatacttctctaatatttactagctactattattttgaatgagtttaatggtttattttcgaggagacaagggcaaattttgctgctctgtattcccatagtattgtggtcttctctatattaaaaactcatcgggctaaaaattgtttgtggttcccatttatttacctgctagattgtaaattccatgaggactggaaattcaactcttatttacctgtgtatctcaaactttgtaacattctttctgtgagacagtcatgtatttattaaaatgaatgaaatgtttatgtctatagactacattaccaatacctcttgcactattaaattttccttaatttcaaaaaagccaaacattatttttttctcatttatatagtttgaaattcttttctagcaataatgtttcacccataaaaagacctattaaaatttaataataaggggagggataaaataactatgcattttttgttgaaatcacagttgtctgatactttaattatgctatctaatttaacctttcataaatgcccagaatatgagaatatcatccaagatttaaataccaattgccaaaatttacagctatcaaatggaagactcaggtttgtgctatgccacattttctgttctttcctttttgtgatggtatgccaaactgtggagaaagaaagcatttctatttgtgattgcctctgctagttatttctgcaaaacaaactactcaaattcagtggcatgatgcaataaccattttgtcatcctcaaatattctggggtcggggttgaaaatgcaaagtggggtgacatttctgtggtatacagtatttggggcctctgagaagtcctagatgtctaggaatgaattaaacgttggacaatgaaatcttctaaaagcttctttacatgtttggctcctgcattggtatgacttaaaggctgggctcaaaataatctcttaaccagagtgtctgaatattgcttcttcatgtaacttgagcttcctcacagcatggaatcatacaggtagcttgcctgagtgtttcagttaatgggtcattgtattgcctttaataatcttgcctcagaagtcacatagaattactttaacgctgagttggtttaagcaatcacagcctgtctgacttcagggggaagaaacatgatgtctaccctttgatgtgaggacattcaaagtattcgtagctatatttttaaaatgccacagttatcttcttttcaaagagatgccatatccttattatcagcaatagaatcaggatttgaaaatagttcttttgctacatacgcatttttataatcattcttgctattataatttttttcagaaagggtgaaggggtaaggattatgtttcattctttctcaaattttgtattctataagtatttttattttttgtccataatagattatggtacaaaggtaactcaaaactagagtgtataaatataaaaaataagttttcatatccaagctgtggataagatattaaaatataaaaaagattttgaatttgttttaaaaattaagtcttctaattttgtgaaaagaactaagataattgtccactaatcactcattaaatctccttattaacttaatttccttattaacattaacaaagcctgcattgccaagacaatcctaagccaaaagaacaaagctggaggcatcatgctacctgacttcaaactatactacaaggctacagtaagcaaaacagcagggtgctggtaccaaaacagagatacagaccagtggaacagaacagagccctcagaaataataccacatatctacaacccatctgatctttgacaaacctgacaaaaacaagaaatggggaaaggattccctatttaataaatggtgctgggaaaactggttagtcacatgtagaaagctgaaactggatcccttccttacaccttagacaaaaattaattcaagatggattaaagacttacatgttagacctaaagccataaaaaccctagaagaaaacctaggcaataccattcaaggcataggcatgggcaaggacttcatgtctaaaacacaaaaagcaatggctacaaaagccaaaattgacaaatgggatctaattaaactaaaaagcttctgcacagcaaaagaaactaccatcagagtgaacaggcaacctacagaatgggagaaaatttttgcaatctactcatctgacaaagggctaatatccagaacctacaaagaactcaaacaaatttacaagaaaaaaaaaaaaccatcaaaaagtgggcaaaggatatgaacagacacttctcaaaagaagacatttatgcagccaacagacacatgaaaaaatgctcatcatcactggccatcagagaaatgcaaatcaaaaccacagtgagataccatctcacaccagttagaatggtgatcattaaaaagtcaggaaacagcaggtgctggagaggatgttgagaaataggaacactttaatgctgttggtgggactgtaaactgggtcaaccatggtggaagaaagtgtggcgattcctcaaggatctagaactagaaataccatttgacccagcaatcccattagtgggtatacacccaaaggattataaatcatgctactataaagacacatgcacacgtatgtttattgtggcactattcacaatagcaaagacttggaaccaacccaaatgtccaacaatgatagaatggattaagaaaatgtggcacatatacaccatggaatactatgcagccataaaaaggataagttcatgtcctttgtagggacatggatgaagctggaaaccatcattctcagcaaactatggcagggacaaaaaatcaaacactgcatgttctcactcataggtgggaattgaacaatgagaacacttgaacacaggaaagggaaacatcacactggggcctgtcatggggtggggggaggggggagggataacattaggagatatacctaatgtaaatgaggagttaatgggtgcagcacaccaacatggcacatgtatacatatgtaacaaacctgcacattgtgcacatgtatcctagaacttaaagtataataaaaaaaatagtaaatatcaatagatacaactgacttaaacaaaagctctttggaatctgcaatcatttttattttatttatttatttatcattatgaagacagtttaactgagatccagtcatttgatagaaaactagagcttcctgtgtcaataaggactgatctcaaaaatgtgtgtccagacaaaagaaagttgcaaaatatgtagagtgtacaacaatttatatacacttttaggacatgaaaacaaattatacttattatttatgaccatacacatatgtaataaaatgttttataagggaatggacatgataaatgcttaattcagggtattggttacctctaggcaataatatttaatcatataaaaggagccccaggccaaaaagtttcagaatcagtgttttaaaagactgtgtccaccatacagttattaaggagtgattaattgctttcctcatttttgataatcaaagatacccccacaatacacacacacatgatctgctaaccagaatatctgactggctttaaatcatcagtatagccacactatgatgaaacaattaaacttaaagcacaactcacatgttggcaagtaaagtttgtcttatattatttccaccttcctaatacccactcttcctttttctgaagtattatctcattttaccaccctccatcatatccaactgcttcttttcccttcatttactccctgtactctctgccttccacattgtttattctcccttttactcttatccttttccttctatcctgacactgcatatctagggttcagtactatccacagttccaggcattcactgggggtcttggaatatatccccatggataaggggggaaaactgtacattttgttgtgtaggtctatgggtgctgtgctgtgttatatggcaaaacatagggaagagaccagggacaaggatctttgcaaagacttttgagctgccagtggagaagagctcaagggagatcaatgtactcactctcactaatcatcttctagggcagatgctggcaatgtttactgagttctagctattttccctagcacaaacaaggctcaaattcacctcccattttacctcctatggacagaaccactggaaagatcactcccataaagagcttattcattctgagccacaccattcattcagtgagaagcttaagaagaaacactgccacggtgtatgaaaaataaatatgaaaaactacctgatatgaaaaatatatatgaacagaactatcaatcaagctgccagaatgtgccaacagttgttaactgtctccggtgaaaacaaaattatttttcacttcttgtaaagcaaaacactggtatttcttatgacagagcatctagttacagatgagccatgttataataatatagactgttttcaagctcatccctataaagaagagaaccagtgaggaacatatttattcacctgtaatattcactgcctgatcttctttttaagtgcaaggtaagtacgcaagactttgtgattccagttttataaagaccagctcttgagattatcctgtcccatcgctaaagtctatctggacccatctcctagagcacgatggtccagttagtgctgtggaatactgcatggtgccatttttccccaccctccccgttacatggcaaatgtctacagaaatcacactttctcagcacgtcaagtcatatgtcatcagatcctattctgatgaacaaaacacgagaaaaacaaaggcaaggacaaagaacatctaaaatgacagaatccaattactatggaaatttgttgtttaaatattcaaaaagatatccactgttttattccaactatatgactagtctggaaaaagcaaaactatggagacgccaaaaagaacaatggttgccagaagccagtggagaagaagaaacaaaatggcagaggacagaggatatttagggcagtgaaactattttgtctatgatactacaagggtatatacatgccattacacatttgtccaatatcatggagtatactacaccaagagtgaaccctaatgtaaactgtggaccttgggagtgatgtgtctgtcaaggtagattcctcaactgtaactgatgaactctgatggggggtactgataatgagggaggctattcatatgtcaggggtcatggggaatatggaaagtctctgtaccttctcagttttgctgtgaatctaagactgctcggaaaataatgttactaattttaaaaaattactcactgaacttgctattaccctaaactataaaaagacagagtcaccttgaaaactgcaaatcactaaagatcaaggtaacagaatatgagtactatctcccaaattgaagcatataaaaacacataaagcaattaattttaattgcatatttaggcaaaaaaaattgataaaaataattgaatatctaatcttatttcataattataaacagggacttaatacaatatgaatcaaaaatggtccatccatgtaaataaaatgaaagacaatttttattctaattttaaatcagaaattattatgcctattttatcccacaattttactgaaaagttaatcaggtaagaaggacagattataattacttaatattgccatagtaacttatgcataaatacctgttaagtattcaccaaatgtcaaaactgtaagcagccttgctgcttaacatgaatgatgcaactgaaacaaataccatgttatggtctatcataatatttgctattatattacataaaattttaagataacatcaaaaatttagtcagggccatagctgctgggcagcaaagatttcatatagcaggcacaagacatccatccttagaaaggcttgcttgcaaggctagtccttggctggtgtttgggaccttgaatttgagagggttcccaccattccctaacttagaagaagggaatggctcactgtgcctaaattgtttgtgcaaatgtggtttactatgaacagttaatctcttcctgggagtctagaattttgttacatgtgagggagagaagaggtggcctatgtgactagcctccgttgaaaacatggatgctaagtctctaatgaaactctggtaaggtagacaacattgcacatgtgtcgtcaaaatttgaggctgggggaattaagcgcatcctgctaactacacaggagatgactcctgtagcttgtgcctggcttcctccagactttgacacatgcaccttttcccttcttgaattttactttgtgtcttttcactgtattaaatataataaatgaaagccccgagtatgactgactgctgagtcctgtgagtccttctcagtgaattaccaaacctaggatggtcttgggaacccctgatacaattgcattatacaattttttttattgtttaagttgatgtgttatatgtgactacaatcagaaggttatttcacagaatacctttccctaatctgcttattatttagtttttgatgtttgccttggagattcctgtacttctatatccactggactaacagcattaaaaatgcatgaaacaatgatgtcagaaagtaattttaaaaatcaacaatcctattttaacccaattaaaaaatagaaaatcttgattgacaatacgttctacagtataaaagtttctggaacaaaaaattaaaagatcacagttttctcccactcggtagagtttaattcatttttattataattgtgcagcaggccaacaattcagtagcacacatctgttgttccacctactcaggaggctgaggcagaacgattgcttgaggctaggaactaaagctgcagtgtgctataatcacacctgttcaaaaaaaagtccaaaaaaaaaaaaaactcctgcaaatagtggaaatgatcagtaaggatcaataggagttttaacttatctggcagggagaagagtctatcttatatatagatggttaaaattgtggtaatccaattgaccatatattctagttaaatcacagattaccaatttctgaagaaatataataccagaaaagcacttcacatttaaactatgtcagataaaacaatttgtatttgataacccagaagacacttaaaatcttggcagaccatcatcgttgtatcattgtggtgcagatataaagaagtgcatttgaaatgtgttctaatagtattttctttagggatgaaatgcaaaaggaagcagtaagagcagaaatacgacaaggggataaaatgaaaagggaactgcactaataaaaagagtcaggcactgatttttctactgatgtgaccagtattccccaagtactgagaactactatattcagcatttcactttatattcttctccaggacattgtattagtttcctgcaataaaatatttttacaatgtcagtttgtcgaaactgctggactgtaaactatttctaatcgaaacctgaaattgtgtcacaacatggctgtattacgattccatgtcagaggaaggatatatacgtgcatctggtagtggcttccagttgttgctgtcagatgtttgtttgggaatgcattcagaagagcttatcaaggacttgagtacaaaacaagcatttccacaaaaaagcaggtaagaaagacacttctcctcacaaatgaccttaggtttagacaattctaggaaaatggtggtacattaactcaacgtcttgaccattttccctgatcctgtatagggagctgctgcagttacaaaagttagacaggatcttggtaggtgtattcttccacatttgaacaccggaagtactgatcacataaacagcgaaccccacaactctatgattgttctttagaagagagtgccaccgagagcttttaaaaagttaactcacttttcagtaatcttactggttagaattgatactccctccctgaaattctcaccttcataaatttttgcagcatcactttatgattcctctccttttacttaagccactgctcaggcttctttcctaactcctctgggaaatgctgatattcccagggttctgtcactggccctctgctcattctatacctttcccatcatggataagctcactcagatctacaactttgcctccgttattccaagtctgcaactccaacctccgagttccatctccaaccataaaaattttatgcaattacctactgaaaatatcccacatggacatttcagtaaactcagcaatgcagagaaaactgttagtcgtggctgctgacccacgctctcctctatacacctgaaaactgcctactccctcgtgtccaggttaaatgctagggcacaagccagaaacctgagaatcatctgagatttctccctatcccctatctttttacattcaacagtcactaaatcatattaactgtacctcttttctgcatctgctttatatttccactgtgacacatttattttatgtttatatttcctagttaaacatgggctcttaagtagtggcttttatagggaaaaaacaactattaatgttatttcttaaaaaaaaaaaagcttaagtaaaataaatgaaaaaggcatcatgccaagaaaaagaccaacatttttaaaggaataactgagctccttaaccttattgatttcaccatggatgggtgaaaacctcacaacagactgacactagtctgaggacagcacaaggaaactatagctctgataactgcaaatgtttcctttgtttccctgtctctttatgtggttatcttccagctaccctccatatcaggggtcagcaaactatagactgtggggcaaatccaatcagccttatagttttgtaagtaaagttttattggagctcagtcatgcgtatttgcttacctcttatctatgactgttttcatacttcaatggcagggttgagtaggaatgacataccacatgaaaaagccctgtacagaaaatgcttgccaatccctgctttataccataaccagaatgccctaatactcaaatctaatcatgtgactccccactccaatgaatccctacagtaaacattgctgtctccctacccaatagtgagtccctgctctgtcttgctggaggaacacatgtctatttggatatttgccatgccaatatccctaccaacccaaaagaagaaatgattatcctaagctcatcatagtaattacatttgcttccccagtgcctggtttaggaatgagcatgtggtaggacccagccaataaaatgttacaggaagtcaactgcacgtttccgagtcttctccctaactaaaagaaacatgtaaagaaaagccaccctttcagccttcagatattgtcggtgagaccatgatgtttggagccgttgctaattagccatgaaaactgacatgaacaaaacactgatatcactgaacggtcaaaataactctggtccctactgttttagccactgttaattaggtcatctagcattttcagcccaaagcattccacctggtaaatttcccatggcctacaggaaaagatctagtttctttttttttttttttttttttggagacatagtcttgctctgtcacccaggctggagtgcagtggtgcaatctcggctcactgcagcctccgtctcccaggttcaagcgattctcctgcctcaacctctcgagtagctgggactacaggcatatgccaccacgcacggctaattattttttatttttttagtttttttatttttagtagagatgggtctcaccatgttggccaggatggtcttgatctcctgacctcatgatccacccgccttggcctcccaaagtgctgggattacaggcatgacccaccgcacctagcctgagatctactcatttctatagtattaaaaagtctgggcagggactggtggctcacacctgtaatcccagcacttgggaggctgaggcgtgtggatcacttcaggtcaggagtttgagaccaacctgtcaaacatgctgaaaccctgtgtctactaaaaatacaaaaattagctgggaatggtggctcatgcctataatcccagctacttgggaggctgaggcatgagaatcacttgaacccaggaggtggaggttgcagtgagcccagagaatgccactgcactccagcttgggtgacagagtgagactttgtctcaaaaaacaaagtctgtcataagcttgccttaggtattcacttcattcccaacattcgcatctcatatgttttgcactagcaaaactgaactgctcataaaccctgcaaatttcactcaagcatcttactttcacacttgttgctccttctgccaaacacacaatcttctgcccacatcatccttctgcctctttacctggaaaagttctactcactgcatggttaccttaaatcttacccacttttttacagctttcattcctcaccacataaagtgtctggcacatatttaacatagtaaatgatcactatacggttccagagggcatctaacacagtagtaggcactgaataaataattcatcaaataattaaagtgacaatgataataacaagctcctgggttttgttggttttttttttcttttttgagacagggtctcactctgttacccagacacgagtgcagtggcatgatcatagctcgctgtagcctcaaacacccaggctcaagcaatcttcccacctcagcctcccaagtagctggaagtacaggcacctggcaccatgcccagctaatgttttattgttttttaaaaaatttagtagagatgaggtcttgtcatgttgcccgggctggtctcgaacttctgggctcaagtgatcctcccatctcagcctcccaaagtggtgagattacaggcatacaccactgtgctggccccaacagtatttttaaatgtctgtattctgtaacattagaaaaaaaatgcttagtactaaaagacatttgataattatttgtgaagtggacaaatgaataaatgatttccttgaaaattctgttgaaaaaaacacagaaattaaataaagctctattctattatgagcacctcaaagaccaaaactatgtctatttcatgtttgtctcccataacgtgcaaaacctaacttacagaagttctttgattaatatgtactaaattaaaggtgtccccttacagttcagattgtccaatgcattaggcatcacatcttggaagcacagaagcattttttgttattgtgaaacatttttatactttcattataatttgttgagcctagagttgggctatttgaatatttattatgataatcttttggctaatggtaacagcatatcttgttctaacaaaattactgttaacagcaattaaccagcaggtagaaaaacacatcttgttctaatgaagtaaatatacctcattcgatttcaaattgggggaaagtcaataatagtgacaccttgttggtttataagtatgtaacatgacctgttcttctcaacaaggaattgcttttctgacttctgcactcagaaggtatctttaaaaaataatttcccattagtattagtgcacattgggtatgtttggcagggttttgtttgtgtttttgtttttgtttttttctgagacagggtctcactctgtcatccaggttgtgatcatgatcacagctcactacagccttgactcccaggctcaagcgagcctcccatctcagtctcccaagtagctggggttacaggtgtgcaccaaaacacccagctaattttgtatttgtttttgtagagatgtggtctcactatgtcacccaggctggtctggaacttctggacagaagcgatcctcccacctaggcctcccaacttgctgggactacaggtgtgggcagcacacctggccatttcacagttcttattgccatttgtttatggtgccagaaaggtattgctgagtttccagttttgaaactaatttctttttttcagtgacacaaatcactatgtaatatagttagcctttgaacaacacggatttgaactgcaggggtctacttatgagcagattttctcccacctctaccacctgagacagcgaagaccaatcttcctcttcctccttctccttagcctgctcaacttgaagactatgatgaagagttatataatgatctacttgcatttaatgaacagtaagtgtattttttctgccttatgattttcttaacagtttattttcctagcttcctttattgtaagaatacagcatattaatacatataccataccaaacatatcttaattgactgtttatgttatcaataaggctgctggtcaacagttagctattagtagttacgttcttgggggagtcaaaagttatacacagatgtttgactgcagagggaatcaagcatccctaaattccacattgttaagggtcaattgtgattgatattcatttactaaacataagtcatttattttaaaaattaaatagaagttccaatttcataacaagtctaattcattataatgtgactataaagaaaacatacaacttactaactcaaaaatatctttttcttggccgggggcagtggctcacgcctgtaatcccagcactttgggaggccgaggcggacggatcacgagatcgagaccatcctgactaacacggtgaaaccccatctctactaaaaatacaaaaaattagccgggtggggtggcgggcgcctgtagtcccagctcctctgcaggctgagacgagaatggcatgaaccccagggggtggagcctgcagtgagccgagatcgcgccactgcactccagcctgggcgacagcgagactccgtctcaaaaaaaaaaaaaaaaaaaaaaaaaaatctttttcttatttatacaaaaatatcacatagaattttagggaccataattaattttttttcagaccagattgtttgaaaaaataaatgacctacaattaactttttaaataattgtgacatctaacctaccaagaaatctaacctatcaagaaagaaataaagattttttaaaactgctctttcatgatcaaaacttccttactcttacttcttttttacccatggtaggaccaccaaaaataattcactatcagaagtcttacctggattgttattttgaggaagactttcaggtgtctgtttttccttatattcaggaactagttgctgaatgctatggataaaaatgtaataaatgaaattattttaaaacaaatgaaaaataccaaatatattaaatttttagagcatttcaaacaatatcagagttaatatcagaactttaattatcccatatacttcaatttgtgagttctaccaacttctctttaagcttctgaagaagaaaaaaagatgaagtactcatgaattgaagggagtatagctcagtaaattaactcacattagcttggcataatggaaagcatcctagctctattaccagcagctatttattctctgacaagttgcttctcttaggctcaatgtattcttctaaaaagcaaggattttactgccttatttcactaggttgttaaagatttaacaagaaaacgttttgtaaatgctcagaggaacagtgaagcaatgaaataatttgttcttgaggtttattgcggaaatggttttggaatcacaaataaaacccaatgtctattttttccagaggttctaatattcaaatgttgcagttttccaaaactgttattaagttctagttttattagttctattctttgtggcttataatttggggcatcacagctagttcatagtttgtaactaaatttacttataaatatattatttcaccaaactagataacaacactgtccactattactgagctcatcaatcacgccaaggggagaaagctaatagatgtcaagacctagcttggactactgttccatacagactcaaactctgaatcggcagatctttgttagaaggatgctcaatccccgtgttcatctccaactgacatggaaaacaaaattctacttttttttttcagttccacgaaagacatgcaagttgacattctctcatttctgagatacatactgacaatatatttgcacacaacatcccacgtgttactcagctccattgatcaccttactgcatatttttgtagtgaaaaatcacaattttaatattaggtgatacccagtttgctttgactcacactgtctttggaactagtcagcaaatagtcaaatgaacttctagtgactgcgcaaaatatggaccacttcaaaaatctgtgcatccttatgcaggcaggggccatgctaatttctctccattttgttccaattttagtatatgtttgctgctgaagcaagttttgtttgttttagactgagtcttgctctgtcacccaggctggagtgcagtggcgtgatctcggctcactgcaagctccgcctcctgggttcatgccattctcctgccttagcctcctgagtagctgggactacaggcgcccaccaccacgcccggctatttttttttgtattttttagtagtgacggggtttcaccgtgttagccaggatgctctcaatcacctgacctcgtgatccgcccaccttaggctcccaaattgctgggattacaggcatgagccactgcaccctgccaaagctctcattttatacatggatattcatgagtcatggatgagacttagctctgttaaatccaactaacatacttgagactcagaattctggtgagggcttcctgccacaaatctgggaaaggataatatgggacattccacgatctaagaaaagggtcctcagcatacagatctggtagcaatgaaaaaaggaaactcgtctctttctgcaacattatttgaactgaaccccgagggcctaaaggataatttatcatgaaggtcttagctaagtctaggctgagacaaaagcgtaacaggcggggtttcaccatgttggtcaggctggtctcgaacttctggcctcgtgatctgccctcctcggcctcccaaagtgctgggattacaggcatgagccaccgagcccggccaacatgaagttcttaaggatggaaggaacctgagcgacagtagaatatgtctgctgtacaataggtattcagcttatgtttgatgaataaattgagaaaatggataaacacagttgggaagtgcaatatttttaaagaaaactcctgtaaagtagacgaacacttttgcaatagtaataatcatttatatttgatcccatctcattaagaggcctgggcccctgacccctctgacgtttccccatcccgggtgccgtggggcctgtgggcaccagaaagccagtgtccctgacaggacggcgcgcccgcatccttcacctggccattacctcttcttcctatccctcttgtccacgccagtgtctccaggagccaagacgtgctccaccccagggacgtcgcccgaccgggcagctctgtggagctcgccaagatcttccaggcggacatcgtgctggagctggtctaaggcgccctcaccgtgcttgctctcgctgccgacgctgttcttccaccagctgtaggagaagcccaaggaccactggtcccccgggtagtccaagtaccactggtcctcctggctcccaacactaggggtcttcctcgtggcgtagactgccggcttcggagaccccccagcccctccccgcttttctccaccccaggaggccatcagtagcgagctactgcctcggccacaacctcccagcaggatagcccgcggtttccaatctgcgaaaggaggaccgctaagccagaaatgccaagccaagcgatcactgccacgccaagcagccaccgcaaagcctcgcgggtaaggccaagccacgcgggtaaggccaagccaatccgttacacaccagtgcgcctgcgcacctttgacgtcactgaacctgtgccttcactgcatctgcagctccagcctcccagaaaaagactccttggtctgcaggtggtgctgcagctccagtgccaacctgggccggctggtcctccctcggaggtttgggggtggcggcgcccagcctgcctgtcatgagtgctgcttcacagcgccgccggtgcacctgctcctaggcttgctcggttcaggggtatgggccagttccgcccccggcttggccactgcagcgaagttgccctagggtcggcgctgccaggacgcaagcggagtctgatggctgggtcagagcggcctgtcagcccggctggaagggcctgcccaacgccgctgcccgcccagctcctacttggcctgcgcccggagccagggaccagctttgggcattctgctgccttaggatggggccgagcagccgctccccgccctgtgccgcagccgctgcgcgcatttgcccagggtccgtgcagctggcgacccgggcgggtcggggaatgcctggtgccaccgggattgctcgcctctagtccgtcctgacccttcagcccgcgagcaccagtgagtttgaagaaaagtgacggctgggcgcggtggctcacatctgtaatcccagcactttgggaggttgaggtgggcagatcacttgaggtcaggagtttgaggccagcctggccaacatggtgaaaccctgtctctactaaaaatacaaaaattagttgggcgtggtggcgcacacctgtagtcccagctactccagaggctgagacaggagaatcgcttgaacccgggaggtggacgttgcagtgagctgatatcgtgccaccaaactccagcctgggcgacagagcaagactccgtcttaaaaaaagaaaaagaaggagagaacgaaggacagagaaggaaagaaggaaggaagaaaggaaggaaggaagcgtgacaaaggagaagctagagagcactcaaatactaattcttgaggacaattaagacagatcgcattatgaaaaacagattttgtcactgaaggctcagggcttcagcctagatcctgcgctgctcacccacagaaagccaatcactgagatgagtattgcaaaggaagaaggctttaatcagatgctgcagccgaggagatgggagctcagtctcaaatccgtctctctgaccaactaaaattagggatttttagtatagcaaagaagaaatgtaactatgtataagaaaacatgaactaggaagtggtaaggaagcaatcatttacaaaagtatctgcggccgggcccagtggctcccacctgtaatcccagcactttgggaggcagaggcgggtagatcatgaggtcaagagatcaagaccatcctggctaacatggtgaccccttgttctctactaaaaatacaaaaattagttgggcgtggtggcacgtgcctgtagtcccagctactcgggaggctgagacaaaagaatcgcttgaacccgggaggcggaggttgcagtgagtcaagatcgtgccactgtactccagcctggcgacagggctagactccatctcaaaaaaaaaaaaaacagaaaaagaaaaaaagtatcttcaccctgcctcctcaatcttggcataattccccctgcgagtggtttctggggtctcagttggcatttagtcacacattgcacatatcgtgtgcacaactgcacagctcagcagtgtcctgggtaggccttgaagggtgatcttcacgtaagcctgtggccagagcaagaaagctgcacacgggcagcggaggaaccagcaggagcccagtccactggaaaattccagcaccacccgcaagagcagctgcagtggagactgtgacctgacaaggatatatgcatgaagatgctggtctgaaaacagactcagtttaagggtggcactttgaaaaatattgataaatgtcagtgagaaaaaaataattagaaacaaaatgtatttattagaaatattagtcatttatcatacactttcctatgaatagttaaatacatataattagcatgtcatgtccaaaagtgctgggtacaatctagtgtgctctttatagacatgaggccacagatgtatcaattacactcaactaatgtagttaaagttagtgtgctaaaaaaaaattagtgtgctactcaggatgttacagatttagcaaaactctaacctggatcagaggaatgaaatgccccgtgaattgaggcaactgtagagactcaaaatgcttctaaaaaggctgtgaggttgtcctttactgcatgtcattggtaggacatctcaaaatggcactcgagctttggaagaatgagaactattgctggatttgacagtgggtctgcatctatgggcccgagtcctccatctccacaagccgcccctcagtggggaagaggagggggagactaagggagtccccgtaatgttcgtgggcagcagggaagagaacatggcagagattcctcaccgctggagggcttgtcccctgggtatgtgtgtttttgtttaataccgactggcatctacttgggttggtctctacaaaagctgtaaaaaaacaaatgaatgaaaaaggaaaacagactaatattgtttttgaagtgaaaggggctaggacaagagaaattcctgagaatgttatccctgcggggggcgggggggagggggatgggctaccatcagagaaggaaaattcaatcccttttcagtgcagagaacagcgacttctcatcttgaaaaactcccccactctactgaggcttgcattttgcagctgtctttcatgtaaaaattatacataaaaaaaggatcttcagaacaaccaaagaattttaaatgactacatactgactgagggaagatggaaagaaacgtggctgttgtggcctctgaaagcctcaggacagaaactgggaatggcacactctgctgagtatagaaaatgtaagatgctgaccttgttttcccagtttaccaactttccaccttcacctggtgctctgagttctgttaaaaacagacctaaaaaccctacctcttggcctagctggggtgaggactgcctcccccaggtcctgcacctccacacgccagcggatggcttgggggaggctactagctgctgtgctagaaggcctattcctgcatccctgaggccatcagtcacaattccaggaccccagcagaaccttcccttccctgaaacaccgcctgtatttctttgtgtgtgtgtgacagaggcagaggttgcagtgagccaagattataccactccagcctgggcgacggagtgagacgctctctcaaaaaaaaaaataaatttttttttttgtggagtcagaggtcttgccatgttgcccaggctggtcccgaactcctgggctcaagcaatcctcccatctcagcctcccaaagtgctgggattacaggcataagccaccatgcctgaccaccatgtgtacttctagggataggacatagcatttctcttctgtatgcacacccactggcaaaaaaaaaatggtagtcagggaaactccttgagttatagaaataaattgcacatggcctttcatgtttctttccttctttttaacctaaagagcaggatacagagaaaaatggagagtttggccacagtcattggcaacttgggctcccattggagaggggctggtatggccccagcatggagggagggaaattgcaacaccattgcccagagatggtactagatggtttgcacataattactaagaacagagccaatcacaggccaggtgtggtggctcacccctgagtaagctgaaatcgcgccactggcactccagcctgggcagcaaagcaaaactctgtctcaaaaaacaaaaaaaaaacagccgggctcggtggctcatgcccataatcccagcactttgggaggccgaggcaggtggattatctgaggtcaggagttcgagaccagcaggagcaacatgatgaaaccttctctctactaaaaatacaaaaaaaaatagccagatgtggtggtgggcgcctgtaattccagctacttgggaggctgaggcaccagaatcgcttaaacaaaggaggcggaggttgcagtgagctgagacggcaccattccactccggcctgggcaataagaatgaaactccgtctcaaaataaataagtaaaaataaaaacaaaaaacagaaccaatgacagaaaacactcccactccccccgtaaaatcaggaacaaggcaaggattccctttgtcatttgtcctatttaaaactgtactggactgtaatcccagcactttgggaggccgagggaggtggatcacctgaggtcaggagttcaagaccggcctggcaaacatgttgaaactccgtttctactaaaagtacaaaaaaaattagccaagcgtggtagcaggtatctgtaatcccagttactcaggaggctgaggcaggagaatcacttgaacccaggaggcggaggttgcagtgaaccgagaccacgccattgcactccagtctgggtgacagagcaagactctcaaaaccaaaaacaacaacaaaaaacggtgttggaagttctagctagtgcaaaaggcatggaaaagaaataaatgacataaaacaaatgtaattccagcactttgagaggctgaggcaggtggattgtttgaggtcaagagttcaagaccagcctgggtaacatgacaaaaccccatcgctaccaaaaacacaaaaaccagccaggtgtggtggcatatgcccgcaatcccagatacttgggaggctgaggcacgagaatcacttgaacccagaaggcagaggttgcaatgagatcacgccatagcctgggatgacagagtaagacctgtctcaaaaaccaaaccaaaccaaaccaaaaaaatgtattacttgtatgataaggaaaagaatcaaatgcatgtacatgggtgggtttgttttgtttttttgtgacagggtctcactctgtcgcccaggctagagtgcagtggtactcttggctcactgcaacctcgacctccccagctcaagtcatcctcccacctcagtgtcctgagtaactagactacaggcatgcaccactacacctggctaattttttatttttttctagaaacagagtctcaccatgttatccaggctggtctcaaacttctcagctaaagtagtcacctcatttgggcctcctaaattgctgggttacagatgtgaaccactgagccgagtctcaaattttttttttttttttgagatggagtcttggagtctcatatcattgctcaggctggagtgcagtggcgtgatctcagctcactgcaacttcagcctcccaggtcaagtgattctcctgcctcagcttcccgagtagctgggaccacaggcgcacaccaccatgcctggccaatttttgtactctttaatagagatggggtttcaccatactgtccaggctggtcttgaactcctgaccccgtgatccacccacctcagcctcccaaagtgctgggactacaggcatgagccactgcgcccagcctcaaatatgttttaatatacattatatttacttcatggaaattgttatgtcattaaaccacttacataaaccattaatttctagtaaacttagcttatttggtcataatagccatgggacatgaacatttaagatactcgcccactgaatgtccatcccctgggtcagcctctccagtgccacgaagtcctctttgttgatcacctctttccctgcacttgtcttccatccatttttcttccaaccttgaacccagttacaccatttatcgtaaacatactgtctgtatacagaaccagtttattgatgttttgagtctttgcttgttcaatggccttgtaggctgcatgaatttccgctctttggtttgtctgccacccaggaagtctaatgcctacatttaaaggatagcccggcccccagtaaacgcggattcctgctcgtggccttctacgcccattactggagcagcagccatcagcgtagacgacgacgaagtctcccatgtaggaaaacgtgtctctgctaactggaggcgccggcttcaccctcggcttcatgtgcttgcatatggctctgcgctttcatctccatctccatccagtggctcacggagtcgcttgctggctttcgtctctgattcttgtccatgttgattttcctgcccttctgaaacttccgggcttgcagatttcctgacaaagtcccaggtctcatcctctgtggcaaacttcttaaatctggcagcaggaaaccggtccacctgtgctttgcactcattcccggtcagaaagaccccggtcttgccgcccctcctcacggcatagaacatcccgaacccgtgagagcagcggcagggcaaggcggccaaggcgactctgcggccaggaacagaagccggctcatcgctcactcccggcaccaggaagcatttcgactcccaaggaaccactaattttacaaagagagttgtcctaaactgtgacaaattttccagtacttaattctttttacaattcattcgttttttaaatgacaaaattgtatatatgttgtgtaaaacctttttagaaataggtagatggtggaatgattgcattgcgctcaggaacatatgcatacttactttttgtggtgagaacccttcttgattttcaagaatacgatacattaactgcagttaccatgttgtgcaatgtatctcttaaacttattcctcctgtctaactacacttttgaatgatttcaccgtctccccaaacccctgcctcccacccccggtaacctccattctactctctgcttctgtgagtagaagcaggaggctggagaattgcttgaactcaggaggcagaggttgcagtgagctgagatcgagccgctgcactccagcctgtgtgacagagcaagactctcaaaaaaacaaacaaacaaacaaaaaaaacagagaatccagaggtcagacattccttttagtaaggactccaatatggtttctcacctactcactccaacaaaattgctcttctcaaagcacaaacgatattgttaaattatgaattaaagcataattcctcagcctttgtcttaatttatgtatcagcagcatttgacacaggtgatctctcctttttgcaaaactttctttgatagaattccagaacacttaacccactttccccccgacatttttgataattacccctagtccttttttgctgtttttttctcacctttactactttttaaatgttagagaagcactaggctcaggacctggacttatctttcttttatttactttcttactaatttttgtgtcattaatttcctgatatttcatattatacctcaacactagactacacccagcaccgtctgacttcttcacttgggtgtcagccaagaatttcaaaatgaagttccacatggagcctccaatactccccagacttgcccttcccctatctgtttaatggcaactcccattttatagtttctcagctcaatattcttgatatccccttttagttctctctgtatctgtctggttctcattctctatctctccatcacacacacacacacacacacacacacacacacactttcagatctgttgtgtatggaaaacctgccagctttgcctttaaagtgcagtaattccaaatggtgttttcaaattcaccttcccaccctcaccacttggtaactacactacttccctcacacggtcagggctctactgcagacatttcttggaggaaataatgagaactattataaattcttatttcaggcaccctcaaaattataggctagccatattctatatgaatttaagcttttatcattgccctttttttcattccagtctctacacagcaaccacagtatgcaattttttagaattccaagccgcatcataacacttttttttttgagacggcgtttggttcttgttacccaggctggagtgcagtggcgcaatctgggctcaccgcaacctccgcatcccaggttcaagcaattctgcctcagcctcccgagtggctggattataggcatgcgccaccacacccggctaattttttgtatttttagaagagacggggtttctccatgttggccagactggtctcgaactcccaacttcaggtgatccacctgcttcagcctctcaaaagtgctgggattacaggcgtgagccaccgtgcccggccaacgctcctgttttaaagtacctgcgctattacttcttttctccctcattagaatttaagcttaacaaacctgggtaactttatatacttttccactgatctgtctccatgagctggagatcacttagtgtaaggtaaatgatcaataaatgttttcaaataacagaatcaattattaatagttttctttctttgagtatacatttagactttcaaaaatcaagaaaatagattggtcaagagatttccatttgttttgattttgttatcctttgattagattagctgtgttagtatagatttcagtgtgggaagctataagcatttcctaaattttaaaatgaaaggcatgggatttgaatatccattccttttatttaaggaataaagacaagcctagcttttaaaatatattttatatatgtaaactatctaaatttatttttctctttatccctgaatactttttcaagttattcatctcattttaaaaaatctacctcgataacattttaaaatacatatgcaacttcattaagaatatctttgttccactgaatagcttgtcaaataatacattagcagtacaatttcctcataattcttagacttgtttgattaaatttatagatttcctactctcaactaataaattcattcaagtataatacatcctacttgatctttgtggggttttcataccatatagttattataaaaattgatttttgatatttgaatcaacttcataattgtattggttagattggtcggtagaatccttttttgttttggttctgttgtttgttcattacagagtggctttgctactgtaaagcttgaagcattttcttttttgttttatttccttccttttttcttccttctttctctctctccctccctccgctccctccctccctttcttccttccctcgttccttccttcctttttctttatttctctcactctctttctctctttctctctctctctctctctctctctctctctctctctctctctttcttcaggttttgctctgttgcccaggctggagtgcagtggtgttaacaagactcacttaaattttttttaacagaaatttatctatcttacattaaccaaatttcagtgtaaccgatatttctttcaagtgaaaaattaaatctttaccatctgttagcctcaacactttaccttctgcagcctcagtttttctgtctccagcaatcctcccatctcagcctcttaagtaactgggactacaggtagtgccaccatgcctggccaatttttgtaattttttgtagagatggggctcaccatgttgcccaggctggtctcgaatgcctggacttaagtgatcctcccacctcggcctcccaaagtgctgggattataggcatgagccaccatgcccagccaaaaggttggaacattttctaaattggaaaacaaagcgcatggcatttaaatacttattccttaaaatttggaagacatgttaacaccatataaacccagagcctgtatttttagattagtaatatgtagatattttcaatttcttctaaagtttaaaaaaaaattttgtattcagaaaattctttataacagaaggtaaacatttttcacttaaaagaaatgtgattactttgaaaacaaatttggttaatgtaagttagattaatttttgtttaaaaaataatttaagaaaaataatgctcaaagagcagtggtcatggcatttattccagagagaggaagtttagcctgatctgcctgtaacaacaaaagtacatggatcaagataattctatagggacatggattaaaagataacatacttttttattttaaaaaccatgataactttttgttacgtgtattaaatgtgagagaacaaacagcataaaaaatgaacttttggggggatataaacaagtactgagaacagtgtgaagaataaaattctcatcctggcttggtgtgggcagaacctcacagcccgagaacaagtccagtgtgtggtggtgttaaggcccctctgtgtaaaagctgtcctcatttaccgagaattgaggtctcaggaaaaaaaaaaaaattactaacctcaacacgaaatgattggttcatcatttgatataccctgtgcctttataacatatacaattgtgttgtcattctatcaggtttatcatttgttacatttaaaaccagaataatttcaaatttgaagtgaaataagtcccttagagaaacaaatttcaaaatacaccccctacctatccatatctatatcatctatatctgtgttagaccatttttatattgcaaaaagcaaaaacatccttctaggccttctaaattttataggataacacaaacattgatgcaatggtgatagacaaagatggatgttaatattatttggaaacattttcatttatagtattgtgagcaaaccatcaaggggttggtggtcttaggcattatttcccactagggtctatacctttgcatgtgaaaagcaggtactagaggaagagtgaagaaagagcactcattgttcccagagaattggactagagaaatatgaagtcgcctagagaatgattgtgcacgcggcgcttttccctgggaaagccatctcatcatttctgttgtatattttactacaatggtaaattattggtttgagtttagatgtgttcattaaatatgggttaatgttatggtaccgtaatgttaggacgatacacagaacctgtaggaatgtatcagtcacataaccaaggagaaagagaagacaacggtgggtatcttgcattgtgatgtgatattgaattgacggattaagacagccaatgtgagctacccacatgcagcaactgaaatttccaaaatagataattacgatgtgctaagatcaattcatatgaaacacacatatttgacgtgaacattttaattttgcatatctggtgcgtatgggctttttgttttgttttgttttgtttttgttttgagacgcagtcttgctctgttgcccaggctggagtgcagtggtgcaatctcggctcactgcaacctccgcctcccggggtcaagcaattctcctgcctcagcctcccgagtagctggggttacaggagcctgtcaccacgccaggctaatttttgtatttttagtagagacggggtttcaccatgttagccaggctggtctccaactcctgatctcaggtggtccgcccacctcggcctcccaaagtgctgggagagtatttgtttaagccggccttgggtcgcagagcgctgcctctgaactggggttgcccgttcctagggaacgcggcacgccctctttgcaggggagccgccagccctcacggtgtgggaaagaaggctgcttatctccagtgtgatctgaaaaattagggatgggcctgcgcggtggctcacgtctgtaatcccagcactttgggaggccggggccggcagatcacgaggtcaggagttagtgaccagtctggccaacatggtgaaaccccgtctccactaaaaatacaaaaattagctgggcatggtgttgaatgcctgtaatcccacctactcgggaggctgagacacgagaatcgcttgaacccaggagacggaggttgcagtgaaccgagatcatgcctctgcactccagcctgggcaacaaagcaagaccttgtctcaaaaaaacaaaaattacgcatgcctgttttacttgttttccagacttgtctctggcttgatcagggcatataactatgtattttttgtatctgtgtaacaaaaaatatgttggtttttaaaaataaaaacataaaaggagcctccagcccgcagcggctggagccggagggtgcgcttgaacaggccagggagccacgaggcggcgcaggacctgagcccagagaaacgacctggaaaggaagcttctcacagaatgcggcgcggacagcggctgccgagcaggggatctggaaagcactggcccctgagccccagcgcagcgcagggtgtcgcaggggttagcccgggtggcgggaagagcccagggagcaaggcccccccccacgcgcaggcgcgctgcgctcccccgcgctgtgacatcattgatgaccccgcgcagaggcctcctcaatgcaggcgcctccctctcagcgctagagcccaggccactgccagggaagtgtccctaccaggcgagtggccctgccaggccctcctgctgctgctcgcggtcgctcgccaggaaaattttatgtggcatgtcccctaaaagcgctcgcatttcagggtaaaatgttttaattatgttgcagccctttaaaacaatcgctgatcattattgatttcctcaggtatttattgtcacaatattaatcatgatgacctcgctcggtattaatatgcatgtcccaactagttcttgcagtgattaattgcacaattattttaagggttaccagttttcctcatgtctcctacgtggcaggagtttgggttgcatttttgcagatacagggtgcagcaggtacacttgtcctctaccttcggggtcaaaatcagtcctgtgtttaaatctcacaggctacttgagctccttgctctccgttttcattcgtagtctcaatatgccaactttattaatcttttaaagattactcatccaatacaggtgactgtacattaaatatggatggaagttggcctgtgaggaaatacattattttttaaaaggcaaccaacaagtactagttcttaactaaaaagtgggggcaagctgagaaactaaagcagaaaaggaaattttaccagtccgaaatagatccattctcggaattcacagaattttcataacatctgactctcagggggcatgaagtgcataatcttccctagattacaaaaaacatatagatgacgggtttgcctatgaaacttcagtactacaagaaacataaaatatttaaatatatgagatttaaatatatttaaaattattaaagtaatataaacattttttagtgactgtgttatgtttttctggttattttgttttctactagtatatttttctgtaaaaattgtaaaactatatcagcaatttctaatgccaaaaaagtaaaaactagtgtgtataaatgcacgccatatctcttccttatgcttttatcttttgtctcccgatgaccctaacccaaacaattacatacatgaggaggacagtttctccatgtttaagtattattcttcaactcttggttatctaattaccaaagtacactttaccatatattccaattcgtcaaggatgacagcccctgcattcaaattttggatttctgtttgctttacattatattagttgaaattttaacctactatcatataggttagggaatgtcagataaactttagtcaacagataaccaccattatttcagcagatcatttcaacctaatatatagcaacggcatagaaatattgcctttttgttaatatttccacatttgatttatttttaaataaacttttaaaaatattcctaaaatgtgcagtattcagaataaatgttttaaattaaataaattttaaagatatcagagacaatgtactaggaaaagcatgaggctagagagagagaacaatacactgtaacgatgatgacagaataatataaaatgagacccctttctgctctaatcatatgaaaatagcacagatggccgggcgcggtggctcacgcctgtaatcccagcactttgggaggccgaggcgggtggatcacgaggtcaggaggtcgagaccatcctggctagtgcggtgaaaccccgtctctactaaaaatacaaaaaaaaaaattagccgggcttggtagcgggcacctgtagtcccagctactccggaggttgaggcaggagaatggcatgaacccgggaggcggagcttgcagtgagccaagatagcgccactgcagtccagcctgggcgaaagagcaagactccatctcaaaaaaaaaaaaaaaaaagaaaaagaaaatagcacagatatataacaccaaccacatcaaaacatagtctccctggtttgcaaactgttcactgaaataaaatttcttttctccaaattccttttcagagacctattgttcacattagcaactctagttaaagcagtagaacaatccaaaagatattttaaaaaatcattttcaagtaaagagcaaatggagagataaaaaataatggtaaatgagcagtataatataaaaatagactagaaaaaagttgtcaattattaggactatgagaaagagtaataggtgatgtaacagaaaagtaaatgatataaatctgaagatatacctaaaatggaaaaaatacacaaattacttcataatgagcacagagaaatagatggaaaacaggaaattatattaaagtaaataaatgataaaaaaaagatcgaggccaggcatggtggctcactcctataatcccagcattttgggaggctgaggcaggtggatcacttgagctcagggttggagacaaacctaggcaacaaggctggaccctatctctaccaaaaaattagccaggcatggtggcacctgtggttccagctactcaggaggctaaggtgggaggatcacttgaacccagaagtttgaggctgcagtgagttgtgatctcaccactgcatggcagcctgggtggcagagcaagaccttgtctaaaaataaaaataaagaaataaaaagatccaataaatgtctgatgaatttatcaatagtaaaacactactaacagaaacatcaaaggagaaattatggtaggaaggaaattcatctcaggaaagatctggaatgcaaaacgaagtaattagttaatactagtaaatgtattaatatatctaagagaatattggctcttaaaacaattcaatacaaattggacctaaaattttaaacaaaagtagtaaggcagattcaaagaaatatttggttttaccacatattggggaaaagatatttattaacgttaggttttgttaaagtatttatgcacgccaaaaatttacaaacattctaaaaatgtagaaaggaaatatgtaagtataaaaaatgacagaaatagaattcaaaaaataagcaaataaaatatttaattgaaaaagaacagaattggggaaaagcaatttaatagaaatcatagtaaacaaaactaaagaaaagtcacaaaatagcaacataacatttcagtaaccataataattgtaaacaggctatacaaaccaattactaaaaacaaaattctgaaattacttgaaaaattaatatccagctacaattattatgacacaaaaagtgaattacatacattctttcacttcagaataaactggagtaatagtaaacagatttacttcacaccttataatctagaaaactagaaaattacatgaaaacagttttcataaacattgtaaaataggactgtgcaggactgtgatctatgacataaaggaaataagaaagctaagtgtgaaaatattaccagtttactccctggaaactgtttccaggccgtgaagcagagaatggcaacccgcaacatggcccaccagtctggtagcatttggaagccagcaatgagaattcgggaaaacacaaaatgttaaattagggggaaagtactggagaaaaagaatctgcaaaagaaaaaatattttaataacaatgagtaccacataaagttaagagttataaaaccattatttcattaacctgatttcaacaaatgtctttatactgataatttttctagtgttatttataaaactaataaaccatttgtttccatacaatcaatagttccacttttttttttttttttttttttttttttttggagacggagtctctttctgtcgcccaggctggagagcactggcacgaactcagctcactaacctctgcctcccgggttcaagggattctcctgcctcatcctcccaagtagctgggattacaggcgcatgccaccatgcccggctaatttttgtattttagtagagacgaggtttcaccacgttagccaggctggtcttgaactcctgacctcaggtgagccgcctgcctcgacctcccaaagtgctgggattctaggcgtgagccactgcgaccggcctagttccacttttagttttgtctgagaaaatatatattatacacatttggtttttctaaattttgtataaagttatggggcacaattgtaattttgttacatggatattttgctgcatggggtgaagcccgggctttttgaatatccatcactggaataacatgcattgtacccattagtaattttgcatcttgcacccccaacccttccaagtctccatgttttcacactctacgtccatgtgtacacattatttagctcccacttaagagaatttggggtgtttgtctttctgtgtctgagttgtttcatttaaggtaacggcctccagttccatccaagttgctgcaataaacatgatttcatttgaaaatacacatatatgtatacgtagaatttttaaaattatctttaaaatttttgcttctttctggttatttcctcaaggtcatccatatatctcctgcagctgaatctctcgatatgcctctgcggccctctgtaccctaatctaaatttttatttttatttatttatttattgagacggagtctcgctctgtgtcgcctaggctggagtgcagtggcacaatctctgctcactgcaacctccggctcctgggctcaagcaattctcgtgcctcggcttcccaagtacctgtgactgcaggtgtgcgctaccacaacatggggtctcacccatgttggccagactggtctcgaactcctgacctcaagggatccacccgactcagcttcccaaagtgctgggattacaggcgtgagccactggcccaaccccactctaaatttttaaaattattgttgaataagtaaaagtaatatgtatcatcttgtacttttttaaaacttcttgaataaaatgtaatagtttacatttcattgacaaatttatcagtccaattctgctttacaatgccatcccttgggaaccacagcttattctctcaagagagttgaaaatacgcatttggttataattatttaacatgaaaaatgtatccattccaagcctaacctgagagatacagataatatacattcctataattgagctctaaagtgcttttattcttaggataaattttaaaaactagaatctgtggagacccaagatcacatgtaaaaccaataaatatatatatttttgtaaagtatgtaaaaatagcattgaaaagaataaaaattaggcaatttgtgagtggaaggagagatggcaaaagtcttttattaacaaaataatcatagttatggaagttttattacatgccggccacattctcagtatgttaaatgtattggcttatttaaaactcacaagaatctcatgagatattaatatttcccccattttaaagatgaggctcagagagattagaacttgcccaagctcatacaatgagtgacccttggagcccagcaatgaaccgagtcagtgacattacagacttcatgataaaaatgtgactcttggccgggcgcggtggctcacgcctgtaatcccagcactttgggaggccgaggagggcagatcacgaggtcaggacatggagaccatcctggctaacacggtgaaaccccgtctctactaaaatacaaaaaattagccgggcgtggtggcaggcatctgtagtcccagcaactcgggaggctggggcaggagaatggcgtgaacccgggaggtggagcttgcagtgagccgagattgtgccactgcactccagcctgggcgacagagcaagactccgtctcaaaaaaaaaaaaatgtgactctttcgaaaaaaaaaagagcagatatttgtttccaccagtgatgatcttcaaaattgttactaccagttttagaatctctggcacgatgagaataatcaggcttatatccataatgtattttaaaggtgaatttgttttggagtagttataaatgaagctgagaaattgacagtaagcataggattggcagaaagcaaaatgactatcttacatattgatgaatggatgcattgaaacataatctgcacaaagaaaaatatttcattttgaataaacatgcctatctgcgtcgattgaaacttggccaggtttctgttctcctttgttttgcattattttcacttgaatggaaaaacattgttactaaattggttaaaattattacaggaagaatgttgtttcgaagtataaagtaatttatacagaatttctatgttacattatctgattgagacagttaagcaaaacaaagtcaaatttcttcttcttcttcttttttttttctgagacagtcttgctctgtggcccagaactggagtgcaatggcatgatctcggcttactgcaacctctgcctcccaggttcaaatgattctcctgcctcagcctcccgagtagccaggattacaggcacacgccaccatgcccagctaatttttgtatttttagtagagacggggtttcactacgttggccaggctggtctcaaactcctgacctcgtgatccgcccgccttggcctcccaaagtgctgggattacaggcatgagccacctcacccagccaacaatgttaaatttcttggtttttttttttttttttttttttttttgagacaggatttcactcttgttacccaggctggagccaccgttcccggccacaatgttaaatttcaatagcttcaagtgtactcattaattatcctctatgaaaaatgtttattctgaaataattaaaattcaaaaataaattgattcaatatatattttaattttatttcacaagtttttgttttgttttgtttttgagatggagtctttctctgtctcctaggctggagtgcagtggcctgatctcaactcacttcaacctctgcctcctgggttcaagggattctcctacctcagccacctgagtagctgggattacaggtgcgtgccaccacatccggctaatttttgtatttttagtagagacggggtttctccatgttggccaggctggtctcaaactcctgacctcaggtgatccacatgccttagactcccagagtgctgggatgacaggctcgagccaccgtgcctggccatttcacaagtatttttatgttaatagtggcaagattttaagtatatgtattaaaactatacctactgcctattattatttcatatgcatgcattttaaataaatagaaatatagcaagaaaaacatttaagaaatactatgctttaaaaaatctcaatacattgtttatgttactaatgtcttttaagtttttggtttttctttaaaagatgaggtatttcaatgctgcccagacttgtctcaaacttctgagcttaagcctcccgagtagctggtattacaggtgtgcaccaccatgcccagtgttgcctgtttcttgactatcaggtaggaagcacattaaatagttttcactcattcactcagcaaccatcataactaaaatttccacaggtaagaatctgaattctcactaaatgaatacactggaatgtttcacttgtatttatcatctagtttgacaaacaccatagttatattgctagacatacccattaaattatcttccttaaggtattaatatcctgttgtatcatttaggaaatacattttagaagtacagtatgccattttatcaagatgttcggtttcactttcattttattctgattataagagttcattgttttgcaggtttgtcttacgctgtatgtcataggttggccaactttttctctaaagagctgcacagtaaatgttctatgtgctgcaggttatagcatgcctgcctaaattgatgtggccatgtcccaattttttgtttcttactaaaacgggctcagcctaatttgcgtataatctcatctctgcttgcctcactgcctatcactcaaccccttaatgcttctgtcttaaatgacctttcttttgcttgggcagactttaattcctagattagatctgctgtgctttctttgccctctgactgtaaatatctatccgtgtgttgaaatgtcacctcttccagtggccttttccaaccagcttcctcttgtagttgcatacacaccacactctacgtattaattagagaattgtatgtccaattgcatgtcctgatttacaatgaaaagccctggtctggctggctgtggtggctcacacctgtaatcccagcactttgggaggccgaggcgggaagatcaggaggtcaggaaattgagaccaccctggccaacatggtgaaaccccatctctactaaaaatacaaaaattagctgggtgtggtggcatgcacctactactcccagctacttaggaggctgaggtgggagaactgcttgaacccgggaagcggaggttgcagtgagccgagattgcaccactgcactccagcctgggtgacagtgcgagactctgtctcaaaaaaaaaaaaaaaaaaaaaagaaagaaaggaaaagtcctggtttacatggaacagacctcgtttatttctgctacccatgtatcacatctagtagagtctttgttccagatactacattgtttaaacaaatactgttacttgcaatacataggctggacagggtttgatagagctcttctttttttattattattattatactttaagttctagggtacatgtgcacaacgtgcaggtttgttagatatgcatacatgtgccatgttggtgtgctgcacccattaacttgtcatttacattaggtatatttcctaatgctatccctcccccctccccccaccccatgacaggccgcggtgtgtgatattccccttcctgtgtccatgtgttctcattgtgcaattcccacctatgagtgagaacatgcggtgtttggtttttttgtccttgcgatagtttgctgagaatgatggtttccagctccatccatgtccctacaaaggacaggaactcatccttttttatggctgcatagtattccatggtgtataggtgccacattttcttaatccagtctatctatcattgatggacatttgggttggttcctagtctttgctattgtgaatagtgccgcaataaacataggtgtgcgtgtgtctttatagcagcatgattgataatcctttgggtatatacccagtaatgggatggctgggtcaaatggtatttctagttctagatcctcgaggaattgccacactgtcttccacaatggttaaactagtttacagtcccaccaacggtgtaaaagtgttcctatttctccatatcctctccagcacctgttgtttcctgactttttaatgatcgccattctaaatggtgtgagatggtatctcattatggttttgatttgcatttctctgatggccagtgatgatgagcattttttcatgtgtctgttggctgcataaatgtctccttttgagaagtgtctgttcatatccttcgcccactttttgatggggttgtttgtttttttattgtaaatttgattgagttctttgtaggttctggatattagccctttgtcagatgagtagattgcaaaaattttttcccattctgtaggttgcctgttcactctgatcatagtttcttttgctgtgcagaagctttttagtttaattagatcccatttgtcaattttggcttctgttgccattgcttttggtgttttagacatgaagtctttgcccatgcctatgtcctgaatggtattgaccaggttttcttctagggtttttatggttttaggtataacatttaagtctttaatccatcttgaattaatttttgtctaaggtgtaaggaaaggatccagtttcagctttctacatatggctagccagttttcctagcgccatttattaaatagggaatcctttccccatttcttgtttttgtcaggtttgtcaaagatcagatagttgtagatgtgtggtattatttctgagggctctgttctgttccattggtctacatctctgttttggtaccagtaccatgctgttttggttactgtagccttgtagaatagtttgaagtcaggtagcgtgatgcctctaggtttgttcttttggcttaggattacagccaatatcatactaaatgagcaaaaactggaagcattccctttgaaaactggcacaagacagggatgccctctctcaccactcctattcagcatagtgttggaagttctggcctgggcaatcaggcaggagaaagaaataaagggtattcaattaggaaaggaggaagtcaaattgtccctgtttgcagatgacatgattgtatatttagaaaaccccatcgtctcagcccaaaatctccttaagctgataagcaacttcagcaaagtctcaggatacaaaatcgatgtgcaaaaatcacaagcattcttatacaccaataacagacaaacagagagcaaaatcatgaatgaactcccattcaaaattgcttcaaagagaataaaatacctaggaattcaacttacaaggaatgtgaaggacctcttcaaggagaactacaaaccactgctcaacaaaataaaagaggacacaaacaaatggaagaacattccatgctcatggataggaaggatcaatatcatgaaaatggccatactgcccaaggtaatttatagattcaatgccatccccatcaaactaccaatgactttcttcacagaattggagaaaactactttaaagttcgtaaggaaccaaaaaagagcccgcattgccaagatagagctcttctttatacatcctgcttttgccatagttgcttctaataccacgtgagatgcaccttcagtgaacagagttctccctgaaaaagatcatcaaatgtgaaagacaaccagtgataacccacctctcttttcccaactctttccttctccttgaaagtaaatgtaatgaactttcctttcaaggacataaggctgtgtgtcttgacataataaatcatgtttggatgtgaaagctgggggcggttttttttcaggctccaggggtgttgggaaaagttttagaggctgctgcccccatgctggcttcttgttatgcccatgtcatgccataagaagtacacaaaagcatcagacctacaggtgacactgataataccaaattctggctatgatgttgaatggcagaaaatcacattcgttgctggtggaacaaaatcataaaatccagcattcacactccttgatatctaccccagtgagctgaaaatttatgcacacaaaaaccacacttagatatttagaacagccttattcataattgtcaaaacatggaagctgccaagatgtccttcagtaggtccatagagaaataaactatgttacatacagacaatggaatattatccagtgctaaaaatgaatgagctatcaagccgtgaaaagatatggaggagacttaaatgcatattactaagtgaaaaaaagccaatctccagagttacgtagtgtatgatttcaactatatgacattccagaaaaggcaaaattatggagacagtacagtggttgccaggagttaggggtggggttggggggatgaataggcagaacacagaggatttttaggacaatggagctattctttaagataatataatggtgaatacatgtcgttttacatttctcctaacacataaaatgtacaacaccaagagtgaatcctaatgtaacctgtgggctttggttggtgactatgtgtccatgtaggttcatagattgtatgaactgctctggtggtagtgtaccactctggtgtgaaatgttgatagtgggaagtgttgtgtctgtgttggggcagaaggtctatggggactctgtactttctgcccaattttgctatgaatctaaaattgctgtaaaatataatgtattagaaaaactttattgagcactaaagcaaatgcaatatttgctggctcaccaacagatgattggctatgttctctaatttgatgttattcacttcaacagctttattgccttttaaatgtttgaagttcactcataattaggaagatagaatagcacagcattcatttcaggatagactgtgatttcactatatttggagttgttgtggatagggatgttgtctctttgcattcctaagacctaatgtaatgtctcatacacagcaggcactggattagttattgttgattgagagagaaagacttctttaaaaaagcgtttttgttaaggagtctgggaatcatggaatcatagtgaccagtaactgttatggactggattgtatccccctccaattcagttatggtgctgcttcagaaagaaaagaggtgagctgtttttcaaaagcatatatctattggctttgaaaatgcctatatcatcatgaatagaatgttggtaaaattatgaaagctggaggctattctggtgaggtctcatatggaaatgagatgcagcttattagaaacagaaggaaaagtgatcgttgttataaagtggcaaataacttggatgtatcacgttctaatattttgtgaaaggtagaacttgcaagtgatgaaattgtatattttgctgaggagatttctaagcaaagtgatgaatgagtggcgtggtttccctttaccacttgtagtaaaatgcaaaagagatacattaaaataatacttaaacaaaaaggaatcacaggccaggtgcagtggttcactcctgtaatgccagcactttgggaggctgaggagggcagatcacttgaggtcaggagttcgagaccagcttagtgaaaacctacctctactatttttgtaaaaatacaaaaaaatagctaggcgtgatgtcatgcacctgtagtcccagctactggggaggctgaggcataagaatcacttgcatctgggaggaggaggctgcagtgagccgagatggcaccactacactccagcctgggtgatggagcaagactctgtctcaaaaaaaagaaccacagcttgaacatctggaaaatcctcagcctacctatattgcaaaacataagacaaatgttcagccgggtgcagtagctcacgcacataatcccagcactttgggaagctgaggtgggcggatcacctgaggttgggagttcaagaccagcctgaccaacatggagaaaccccatctctctactaaatatacaaaattagccgggctggtggtgcatgcctgtaatcccagctactcgggaggctgaggcaggagaatcgcttgaacctgggaggcggaggttgtggtgagccaagattgagccattgcactccagcctgggcaacaagagtgaaactccgtctcaaaaagaaaagaaaagaaaagaatggaaaagagaaaagaaagcaaatgagaaaagaaaggaaaagaaagaaaagaaaagaaacaagttctgaacagaaaacaaaagttgtggcagaacagccatatggtggagatcatgggagtgactcatggatttaatcagccatctcaggaaaagccaagaatggagatggattatatccacagagatagagctagtttgaactaaagaggaattaaaaagtgggatggcataaaggaagactgtcaaacttcttggatactacaggacaggacagtaaagctgttaggctgcaaacattttcttgaatgctgtatcattcaagaaaatcattcaagaaaagagaatgaccatgaagatgactcagtggtcatcagggctgcaccctccccagaggcccagggaggacatcaggactgtccctccccaacttgcaaaggaagggtgtggctttggtttcctaggccaggcagctgctgcatagcatcttggttttctctagtaagattatgatttttcagagtggatattttattttatttatcctgcttgagatgtgttgaccttatcaaatctttgtttgatattttattgattctggaaaatcaaacatttctgaactatttttcttcaaatgttacttttgtgtcactttctcacctcccccagtgacaccaattaaatacatgttaggctatctcaatgtattcccaaagtttctaccttctcttctgtgttttcatttttaggctgctttctgtatattttcttatgacctttcttcaggtctgttaattttttcgttcatttaaataagatctgaaatcactcccattcaataattgaaaaaggaacaatttcagttttaaagttttcagttgtaaaaattatactctattcattttcaagtttttatgttattttcttctattttttaagtaaccagtttcctgatcaaattttactatcttggcttttatttcttttttctttctttaaattttactttaagttctgggatacctgtgctgaacgtgcagatttgttacataggtgtacatgtgccatagtggcttgatgcacctgtcaacccatcatctaggttttaagccctgcatgcattaggtatttgtcctaatgctctccctccccttgccccccagccacctgacaagccctggtgtgtaatcttcccctccctgtgtccatgtggcttttatttcttagaacaaaatcatatttgcttaatcatctaagcctcaagatctaaaatgtgaacactttttgagaatatttcttttgtgaattatttctcttgatttttccttatagtatcatgtcttgtgtgactttttatctttatgtatatctttatttatatctggaaattgtatctgataactgtattcctaggtctctgaatcacacaaatgaaaatgacttaggtccatgaaaatgtgattattggtttgctttttgagctattagaagaataataaattatgtaaccacattatatgtgaaagagaaaatatcagttctcataaaatataagacttttacttaatattttaataataaactcatccttaaattttgacacttttatgctagtgctattattgtttagagttgacacataaaaataatagatattcagaactgttaagaatttaaaatattttattcagtgtcaacaattacataactttttggtttgaaaagtaatctttatacaaatataaacaaagcttgaataacatctgaataaaaatgtatttgtactaaggtattttgcattagatattgaagactattttgataacacatttctgatgtactctgcacattggagttaaggaagatcaatttcttttggttataggttgggtcactttgaccttgtccccatcataagaatgggcttccttaattttgaagatgttctacacacatcatataggtcaggatttatcaatatagtaattgtgctaatttaagttgcaagtaaaagaagatccagcttaaatttgccaaccaatagagggatatgacttactaacaaaagtcaaagtataggtttcaggactagtgtatttcagtgtgttaataaaatcataatacctggtttgtttctattaagtcacacttggtttcttgttttcagatagtttcccttgcaaagttatcaaagtgctccccagaagacattaggtatttgctttctagtctacatacaatgaaaaggaaaaaacgtcagttcctgaagctctctcaaaacatcaacagatggaaagacgtgcccatgtcctcccctccctccactctgggggcttggaaatgctgcagcagggagcaggccccaggctggacctgccctgtcctcacgacgagtgtgtgcaaaagtgaacaataaatcatttcaaagatgcaaggaagaaaaaccaaaacatcaacagaatcttctttcccataatcttcatgcacctcctggtccggatgagtttatgttcccatctccgagcacagggattgattgtgatggcatttataggactgagtgccccacactctgtgatccagcatggagttatgatttacatcaccacaggaagagtacagaggcttcaacagaaaaaaaggtaaatttccaagtaaatgggcaatcggtttggggaaggcattaaaaatttctgctatatcagagatatgatccaaattacaaagtgttgcaaatcaaaacatttatgcttagtttaaatagttttcagaagatgtgtgctaggcaaagccatcatcctctgattaaagtttcactgagttgctgtcacggagtgaataggaaatatttgtacctggaaatggatttttttctgagttttaaaaagagaagttttccagttctttgaaattatcaaatatattaaccatgaataatcattaccttaataaagagagttattttcgctttttcaaaaaaaaaatccaaacacagaaccaacaacaacagtgacgaaatcacaaaagaaaaggtccacaacaaaagcactgatatggagcacagaagatctagaatcatacaaagactctaagcctgactcacacattgactgttgcgacattagtgcaaaacttacaatgatatgtatatacaaaacttacaatgatatgtatatacaaaacttacaatgatatgtatatacaaaacttacaatgatatgtatatacaacatttataattatatgtatacataatccattttacctggttttgggtctcataagaataacaaataatttatatttcaggagccccacaatgaattaatatgtagacagatgtattgattcatttgtttctattttattgttaaatagatttaattttatcacaaatgaacatataatttttaccctcttaaccatttttaagtatacagttcagtatttagtatattcatattgttgtaaatccaatttccacaactttttcatcttgcaaaaatgaaactctgtccccattaaacaactcccaatttcccctgccccaccccctagtaaccctgtagtatcattccactttctgtttctaggagtttgcccatgcaagatgctacatataaataacattatacagtatttgccttttgtaaatggctacatttcacaatgtagtcaaggttcatccatgctgtagcacgcatcagaattccttccattttgaggatgaataagatttcattgtatgccaagacgtatatcacattttgcttatacagtcattcattgatggacacctaggttgcttctactttttggctattgtgaacaatgctgtttgaacgtgggtataaaactatctcttttagaccctattttcagttttactcggtatgtgtccagaagtggaattgctggattatacagtaattctgcttttaaggtttgaggaactgacatactgttttgcatagcatctgcaccactttaaatctcttccaacagtgtacaggggtttcaatttctccacctccttgacatttgttattttcttttttaaaatatagtggccctggttattatttattcactagattatcttcttcagtgtttgagttttataagaatatcaattctatttttctattatccttttataaatatttcatataaatatctcatcaaataagataatttattgttagtttttatttcaatgctttatagtgaaggccactgaagatatataaatgatacattttgcgttgactcctttgtgaatggctatcaataaaaatttttcaataacttactatgtgccaatcactccatagcgttctaagtaggctttaacattgccatgttaaacttctctgcttgtgatttctatatctaacccagctggcagcaagacagttttgttttttcattgaaatggctctggctttatgtagaccattcattcactttccatgccacttccctgaaatatttgtggttcatattttcaactcaagtaaacatttttttttcgatactctgctgcattcctgatgtcatacacactatgcaaacggtcaaaaaataactctggtccttttcaggagaaatatttcattaaaaataacttatgaaaacatgaccaaaatatgatagactattcatttgtcttttaattaggtaaatgcttgtctttctcaaatgtttcaccttcttctataattttatcattttacttttttaccttgtcttttgatttctaggttatattcatttctacaagaccacattttaatttttatttcattttctatacatttggcattcctatctggcaagcttcctgtgttatttagtggtatacaagtaattgcttctttttcatttatattttactgtctgtgacatctttacaattagttgataatttctgtcatgcatcacaataactcattgctataaatgtcctatttttaaaatttttctcagctccttttctcatttttcttttaattcttcctgtattctattttctgattcttgggttttaggcttcgaaaatacctttatatatccctctggattactttagtttcacaattattctttaaattttatataagccttacatacatttagtattttctggctaatgatattgtatttgaagcttgagtataaatacaaaaaatctttttttccaagacatttaataaaaagaaatagtgttaatgtagttagagcagatgactagatgaaatgcacgactttcccacccatgaataatggtgcctctttcactttgccacaaaggacatgccttatacaaaggatagtattttctttactatctgcatatgaagatttcacaagccttatgcctgtgataattaattttaacgtattaacttgtgtgggcccagcgcccagatacttggtcaaacattattctagatttttctgtgaatgttttttggatgaaattaacatttaaattggtagactctgtgtaaagcagatgaccttccattctgtgggtgtgcctcatccaatcagctgaaagttttgtcagaatgaggacagaattctcccaagcaggaagggattgtgccagcagactgcttcggactcaaacagcaactgtttcctgggtcttcagcccgccggcctaccctgcggtcttttaggcttttaagggactggctcacatgattgtgtgtatctatatttatatctaatctatatcatctgcatcactcatttctctggagaaccctaatatatgcccttaaaggtcattttatatcaagcgtttatttttgccagacatgattgtgttgcactaatatttgtctcccttttcttaaaattatgccttcatttttttgttgaatattacatctgtgacttagctttctagtgtgagtgtgttatttgttgtcaagatgaaaaatacacatacacaatttaataaacattaaaggaactgtggtgaccaaaatgcagatggatgtgagaaagaagggctgtgagctgccacctcattaatccacaatggcaccattttcctctcacctgaacttttagaaactttttttccaccttacaattgcttatgcaataaacttcactctcacttagactccataacttatcccagaaaccttaatgcctctaagcagcaacaaatagactgacaaagagatgtgttaccttgttcagacaacccgatgattctgtgaaagcacataatgaccatcttcactttacatagttaacctgaactgccaattaaattgaactgttctcatctgacgtagttattggcctagctttttccctgtattcttgtactggagacatttaatatggtcatcataagtgaaggtaagttatttcaaataaatatactaattggatcagactcgattctattttactttttatatttcaactgtgcatgtatacatgcactattaatttggttttaattataattttgattaataatttgaatctaaacttatccccgtccctgatacttacccggccggagctagcacaatctttgactggattatagcaattgactccaaatgaccctactgcgtttgcttttttgcctcccattaatgcttgcactcagtccagcggccagaatgttcctttaaagatacacattgaatcacattactcctctgctcacaaccttcccatggctcttaatcatatttcatctgaagactagaatcgttaaaatggcctgcaaagtgcattatgattcagtgctcagtacctttctgactatttctcctgctgcttttccactttgctttctccactgaagttatgctggcctccttgaagtttccttctcagctataggaggtttgtgctgtatcctccttcacctgtaacagactcttgcgggtatttctacaactcactcctcatatcatttacatcttctctcaaatgttaacttcacagtgaagtcttccttcaatatcctacttaaaggtgtaccaagtttaccagcccagcaggagcttctgtctcctctgtgatttgtttccctccaaagcacttattgccttctaataaattatacaacttattttactttttctctttgtctctttttattgcttttttggttcatttcttattgtatctcttccaccaaataaattttgaataaaacatttttactaatttgtctcatctccataatttcagcaaaaacaacagaccttcattcagcttaggaacataataaataggacgaagttgaataaacgaaatggaggggagtgaagtattccagatggaagaggcagtacgtggccaagaggaaacagaccatgtgcgctggagaaaaaggatggccagacttgcagaaacctggaattggtgattggctttagaagtggagagacaaaaaaggaggcatagaaagtgccaacatttggctacacagggaagaaagacgtaaaataataaaaacattggcatcacctgtagactcaaatcctgtgagtgaaggacctgagcaatgaaggatggattgaactcgtgattagccttcttcagcatatgtaaaatgatgtctgcttttcttctctatttgtcattttaccgactttttatatatagtagtttccccatatccatggaggatgtatcccaagacccccagaggatgcttgaaaccacagataataacaaactctatgtatcctatgatttttcctgtacatccttacctatcataaagtgagtgtataaactaggcacaggagattaaaaacaataactcataataaaatagaacaattagtacaacctaatgaaagttatctgaatgtgatctctctcaaaatatcttattgtagtgtaccatgggtaactgaaatgatagaaaacaaaattgctgataaagggggatattgtagtaaaataaagggggatgggtagagcgtaggaagcattcacaattagaacagttggcagtagggaaagaaacatactttaaattggaatgtggatcacatggctgcctcctgccagtcatgatcgcagggtacagaggcctctggtatgtcaggtcttctctcccaccactaatactgcccaaaagactccatcagcaaccagagctgaatcacacacaacccagattgtcatttctgatgactttgacttaaacaaacagacatatttttaatctttttagtgtgtgtgaaactagcaaggcctaatgaattgagtatatggatgaggtttgtggcctctgtaacgttttctccaaccagaacctactgaaatagcacagatggtgatgagtatggttcaaacacaagaattcttgggtaagtgacaagaatctcggtctcctgccatttccatctctgcatttacttactgtgtgaatttggacgagtcatgtaatcttctggcttcagtgtgtttatctctgtaattaatatgttcagtaacagttcttccctctgacctaaaaataaccacttcttccaaaggtatatattagaactatatacatatatactatacaaatatctaacatttatatacttaatatatgtaataaacatactacacatgtaaatttaatgatctaccctattctcagcctctactttcctctgacaatgacatcattcaaatactctaaaaagctcatattatagaatctttatatttaaaaaagttttgtaatgctctaaacttaattgcatattgctaagtgaaagaggccagtctgaaaaagctatgcactgtatgattccaactatatgacattctggaaaagccaaaactatagagacaataaaagtatcaaaggcctttagggggttcagggaaatgggtgaggaattaaataaatggagtacagcacacttttagggcagcgaaactattgtgtatggtactctaacagtggatatgtaacattacacttttatcaaaacctataagccccaaacagaatgttgtaaatgtaaactctggacttcatttatttgtagagacaggactttagttaaaagtccatattggtttattaatggtagcaaatataccacacgaacgccagatgctagtaagagcagaaactgtgttgggaggagggaagatgtatgggaactggactttctgtgcagtttctctcggtaaacctaaaactgctctaaaatttttctattgaatttttcaattattccagttattctctataaattagcatacctattggcccccaattaccttgctaattttaggttacttatttttatatggttctcgatttagtctccttgggcaaatagtaaactgcatggcttttactctctctgactttctttttctgtccttcacagaaattgaagttgaagtataaggagaatttttacatcacccaggttctaatttggaaggtttctaacagccctctgtcctcttctggtgctcactgtgaaagaatttgcaccctgcaacactaagtgtttgtgctagaatccacttctgatgttggctgctctgacacagcttccattcggtatttatgttgagttctttcattttatgttgctctaatagaatactttagactgtgtaatttacaaagagtgaagttttatttcttacagttctggaggctggggagtccaccccaggtgctggcatcttgtgagaaccctcctgctgtgtcattccatggcagaaggcaaaagtgcaagagaatgccagagagcaagaaggggaagaactcagttttataacaaactcactctcaagataactaacccattcctgctatagcaacattcatccattcatgagggcagagcccacatgacccaatcacatcttacttggctgcatctctcaacactgttccattaggaattaagtatttaacacatgacctttgggagacgcattcaaaccatagcatatgtcctctatgcagttgccttgtctagatgtaggacactgagaatttaccacccttccagcattgacgtgctctctaggtggctcaagaattcttggctgtgtctccaccaggcttcaagaccctccattagcctggcttttggacctctgtggttccagcccttgctagacacgggtttctctaagagatctgtattctccacagtctgtatacagaaaagatagtctcaaatctcctctgatttagggccctgataaaaattacttggtcttctactctacaacctcaccataccccttcaggttttgaacctgggagagacagaatatggaacactttcttaaaaataaatgcatacttgacattaataagggatttacaatctattcactatgaaatcctcaggaacatgtaggtttttccaagaagtaaaaaacaattattttcatttaagtcatatgtcaattaacaatattttttacacaattaaaaatctcatttttgttatgaaatgtgaaacacatttcctttgtttttgaggcagggtctcactcttgtcgcccagactgcattgcagtggggtgatctcggctcattgcaacctctgtctcccggattcaagcaattctcctgcctcagccccccaagtagctgggtttacaggtatgtgcaaccatgcccagctaatttttttttgtatttttttcagtagacatggtttttttttttaaattttattattattatactttaagttttagggtacatgtgcgcaacgtgcagatttgttacatatgtatatatgtgccatgttggtgtgctgcacccattaactcgtcatttagcattaggtatatctcctaatgctatccctccccactcccaccaccccacaacagtccccagtgtgtgatgttccccttcctgtgtccatgtgttctcattgttcaattcccacctgtgagtgagaacatgtggtgtttggttttttgtccttgcgatagtttgctgagaatggtggtttccagcttcatccatgtccctacaaaggacatgaactcatccttttttatggctgcatggtattccatggtgtatatgtgccacattttcttaatccagtctatcattgttggacatttgggttggttccaagtctttgctattgtgaatagtgccgcaataaacatacatgtgcatgagtagacacggggtttcaccatgttggccaggctggtcttgaatgcctgacctcaactgatccacctgccttggcctcccaaagtgctgggattacaggcatgaagtcaccacacctggccacatttcctttttgaaatgtgatttattttatgaggaactgtgtgaaatatgaacaaatgaataaataaatctcatattttttatgttaatggatttgtgaccaggccaagaaataaacagaagtagtaaatgagagatgttggcttggacttatgtgagttcctgtgtgtttgctaattggtaaaggaaatgggccaacaccaacttggaatacattgatgctgatttctaatacttcatcagaggcaagcgtttagggaagtggagcacacaaaatcaaggacttggtcagggctcagcaagaactgggtttgctagatgtctgctaggcagctttcatcccattaacctctgggatactgtgtccgtgttgtccttctggataaacagaggaatcgactctgtagagctactatcaacagagtcttaggccaccttcaatatttccctttgattcctgtgggtaacatgagagccaaaatttcatcccagccatgctaatcaccattgtttatgaggttcttagataccccgaggctttccaacatggccactcacaagatggaagctaagtagcactgaaatgtacatttaaatcaaaaaatattaatagaacattagataagatttcaaccaccatagtaagtaaaagctcacatctaatccatttagaaaggtctccggatacagtatacaaaatcatttgtataaaaatacctatacgtgcaaaactcagttatatttctgtgtatcaacaattaataaaaagaaatgcaaagaataaacctggaggacctaaactatcagatatggaatgtgttattaatttacagtaagtcaggcaataagcacagggtagaaaaaccatcaatggaataaaatggagtctagaaaaagattcaaaagtagagaaaacttgatttatgacatatgtggcactgcagtttacagaaaaagcttaacttttaaaaaattttgctgagtcattgactatcagtttggaaaaacagtgttgtagcccttaccttacaccacaattaaaaatttatcccagttgcatagatctaaatgtgaacagcaaaacaataaatgttatacagaaaaacacaggaaatcacatcatagtctttagaggtggcacacatttttaaaacagaacacaaaaagcatgatccacagggggaaaaaagaaaactggagtatgttacaattgagcattttattcaggagagcagtgggacacaacacaaagtaaaagatgttcactatgtatatatacaatttaagactcacatctagaatacacaaaaagaatgtaccaaagaacagaatatgtataaagaactactataaattgaaaagggtaagtcaagagatccaaaaaaaactagccaaaggcttgaatatatattttcaaaattatatatatatacatagggacagtaacacactaaaagtggctcagcttataaggaaaattaacttaaacttagtgtcagtaaatacacactctagtgattataatgaaaatagaccaaaaaaactaatgttttttttttatataaactactgatgagagtttaagctggcaaaaattcttaggaattctgtttggcggtatctattacaactgaaaaagtgttcagaatcagtaaatccactgcaagttatgtgcccaacagaaaatagtaccgatttttaccaagacatgtgctagaatgttaatagaagcagtcatggtgacggtcctacctgaaaactgcataaatgcccatccacattaaaatttataaattaattgtggcatagtcacataatgacacttccagaaaaatgtggaagaatcctacaaacatactgctaaatcaaagcatccagacaccaaatagtacatattgctatatttaaaaactggcaaaacaagtcaatgctgttaggatttaggataaggttatcttcaggaaaggaacggcaggtagagactagagaggagtactagagagacttgtggtgcagataatgttctgtttctcagcctgggatcctgctaaccaggcatgctcaatttgaagaaattcatcaacatatttgcatttatgatatggacacttagaatcttgaatatattatctgaatgaaaattttttaaataatcgattgaaggaggaaactgaatgatgactaagaagaaagggacatgaaatttgatacacataagtagttgaataagttatcaatgtacagagtaatgcaggaataataaaataattcctccagtaaacagacttttacaaattttaccaagcagtgtagtatttccagaccaaaagagaaagaaggaaatgattcatgacatacaatttgaatctttgttatttttggcacaaccctgtggaaagcaaatggactttcaagaagagttatgttgttttgaatcttcactaccaaaaattcccagagaggatagtgcttgcacaaacacgttcactgtaaaatgtacttttcatagcaaacacctgaaagtaactgaaaggtctcagtgcaggatacggtaaagccagttgagactggttaggggagctgataatgctcacctcttcacaagttcacagtcagggacatcatgttggctgccttcatctttgaaatgctggtggtttaacatttacaaactgggtgaaaggaaatagatatttttctaccatatattggcaatattaaagagcaattaagtttaagagactttatactattctgctgaaagtgcttcattacagtttttttatattgccattcaattacacatatatatgatttaaaatgatacatggggggaaaactaaaggaaatgcagtatattaatctcagaagctatgatttcataacttttaggctatcctatagttttaaattatttacaaaagcctattataaaattttaaaagacagtaaaatgcattaagcttttaaattcattcagaatggctacaaataatgagtctttaaaaatttgtatttattatgaaacgaataaaacctagtgactccaatgcttatatcagctaaagcttgctgctgtcaatgtgtcttcatttttaaagtcctaatttactatattgtttgaaatagcgttaagatatatgtttcatttggaacacttagtttttcttaaaagaaagacaattagtacaaaagggattaacatccacatagttacaaaattcaaataatacgggtaaaatggtacactctattagaggattcaacccataaattacaaaagtctgtgaacattgttgtaggactccaatatgtatagcattaccctttaagacttgtatttcaaatgtaacttaaaactaccatacaaaaattaaaagcacagaaacccacgagagccataacacaatagccaagtaagcaaccaagtattacatattgttttatttgtggacgaatatgtattaattgcaatcatatgagcttcatgttttcagtataagacatcatatgttgtaaaatccaggtaatcacagggttaattggataaaatatgggatttgtttatctgctacttaagacataatcttttggcttactttgtgagtcacactctaaacatttggttttaacatgtgatgtaataaattttaatagggctcccttttgaaaggggaagagctctgtatgcgcaggaaaatgtgtctgttgatgcagtgaaatgaagttattttaatgtattcatttttacagctatgtaggcaattgttaattatatttctaccagcaaaacaaaactatatatgtgtttgtgagaatgtgtgtatccctgtgtgagagagagaaagaaatagggatggaagagaacactaagtctaatgcattacaattcagttaaattttcaacgtaagtcagactgcccacaagaatatcatttggccgggcgccgtggctcatgcctgtaatcccagcactttgggaggccaaagcgggcgatcacaaggtcaggagttcgagaccagcctggctaacatggagaaaccccgtctctactaataatacaaaaaaaattagccaggcatggtggcggacgcctgtaatcccagctactcgggaggctgtggcaggagaatcgcttgaacccgggaggcagaggttacagtgagccaagatcatgccactgcactccagcctgggcaaaaagagcaagactctgtctcaaaaaaatatatctatatgtatatatatacacatatatatgtatatatcatttatagatatatataatttaagatattgcagagtgtgtgtgttggggcggggaatgacctctgaaaacaggctacagggggcatcgtgtggttgggcacggaccccgaggtgcgaggggaccctgagctcccaaggctgagggtcagaggcagggcctgggagccccagggaagcctccacagccagccacagacacagtaagcgtccttgttcacgacacagggcacacagtgctcggtgagccgggtcaggatcagatgctggtggtctctgcccagtgcgggtctcgcttcctgacgcaggtgcgccttgggctcccacaggaagcggtcacatccagactcaccaggcctgagatgttggaagatggagaagcctttgccacaggaaaaatcctccatgaacacaatgaaacttggcctgcacctgggacatccttctccacggctagtctacaatgcaggtgctctgcacacgctccctggctgaccccaacgcagagaagatgcacgtgagcccacccccacagcaggcgtggacatttgcctcccttttataatagctgtattcaaatgaggtatcctggaagcctcgttctgataggatgagagcagactctgtactacaacacggattggataatagtctccaactctgattggttaagattgtgcaatcagagatggaaattattatccaataagagttgtcaaaaaggttccttgcgcagtggtcgtcatagttcagaagcgaccgggagcgtgtgtggtgcgcgcctgccttgaggccaggcctcagagaagggtgtcccagatgtaggcaaagcgtcctccatgtgttcctggaggaccgtcccaagtccttctccattctcccaacctcttgggcctggtaagtctggatgcgagcgcatcccacggggccgaggcacagggagagaggaacggggcagagggaggaaagcgtgtgcaggggcccggagcgccaggctgccagggcttcaccccatggccaccggggagctgtggccccactcggcccaaggcagagtccggccctcctgctgctggcactgtcacctccctggggtcctgccttctgggtccctgtgggcctcctgtcatctggcactggaaataagctagcgaagcaaaatttcgtgaatattggcctttgcatctttttcttcattttcagtgctggtttttctgttgggtcatttatgttcttacattgatttgaataattttaaaatgtattttataaattaattcttcatgggctcatttctagtgtagatagttgtttcctagtctggtcattgttctttaattgtattttgcatttctttcttgctgatacataggaatctgattgattttatgtattcatcttgcatcctgtagcctggcttaattcacatattcataaccatcatttttggattgtggtgtatttttcatgtacataatagtgtcagccacatacaataacagctgtattgcttaaatgttggttcttatacctttatttttgttttattgtcccaattacacctccagcactgtgtgaaatagagggggtatgtccaggaagtcttgcttggttctgattacagtggaaaagcttcagtggtcctgtgttgtaatttcattttagacaagcttaatcagattaaggaagctgccttcctttgcatttgctaagagttatgactaattgttgaatttgaataaatgctttttttacatatattctgaatagtaatgtttttctcctatttttctgcaaataggatattttacatgatctattttttaatgttaaccaatcctgcattttttagtatatcccacttggtatctatgtgttatgttttcatatgtggtttaattcatattatacaatttttcttagaatatttgtatctctggccggatgcggtggctcacgcctgtaatcccagcactttaggaggcctaggcgggcggatcacctgaggtcaggagttcgagaccagcctgaccaacatggcaaaaccttgttcctactaaaaatacaaaaattagctggatgcggtggcgggcgtctgtaatcccaggtactttggaggctgaaataggatacctgcttgaacccgggaggcagaggttgcattgagctgagattgtgtcactgcactctagcctgggagacagagcgagactgcatctcaaaaaaagaatatttgtgtttctgttaatgaaagagtgggtccatacttttttttttctaatgtcctgttcagattgtggtatcaacgtgatgctggcctcacaaaacaaaattgaaaaatagtccctatatttcttctctttggaagggtctgagaaatttaggtgtttacttccttaaatgtttggaatatttctttagtctgggcatggaattttacttgtggaacattatttgttagctgttttgttgttgttgttgttttaacaattcaaatcctttagtatatatggtagttttctggttttacgttatttctgtgtccagttttgtaagtgtatttttcaatgtgtgtaatttcatctctcttgtcaagcttgcagtcctaagtatttctcagaattttcgtagtatcttgatacactgctctgtagagcaggcctctgttttcattcctgatattggtcttttgcgtcttttctctttgccttagtcagtttcgctagtggtgtatttagtatattaacatttataaaccaagttttttttttttttttgaggcggagccttcctctgtcgcccaggctggattgtagtggtgcgatctgggctcactgcaagttctgcctcctgggttcatgccattccccggcctcagtctcccaactacctggtactacagacacccgccaccacgcctggctatataaaccaacttttatccttgatttgtctccattacaattttttttcctatttcattgatgtctgctctttattattactttcattctgcattgtttcgttctaatcttttttagttcttgaaaggtttatgtgattgattttcaatattttttctattctaacacattcccttaacgtgtgtcctgtttctctctaagcggggatttatctggcaggccacaatttcccataggtgtttccagaccctgtgtctgcagccgcgttggcctcccactgtctccaccctgtatgcctgcagccatgtcaggctttgtgtgtctccctccttgtgcctgaagcctgtatcttctctccagtatcaccatcccataatgactgaagcccatgtctgcccttgtgtgttgtcacctggtctgtcctctgcctgcagtttatgccagctgtcaagtctccatttcttgcacctgcagcccatgccagccgtgtgagtctccatcctgtgtgcttccaacacattacttgctttgagtgttgcggtctccttagccttcaggcagtagcagtcctccagtgcctcaatccctgtgcttgcagcccattctgatattttcgtctgtctgtcccctgagcttcggcccatgccagcttatgtttgctgcattctctgtccctctaatccatgtccacagtgttttcattcatgcttttcagtcgtgtctgcactcgtgtgtctccttctgtgcctttagtccatttctgtcctttttctggatcatttctcccaggagactatgcccaaaactcctatccccagtgcttgtacctgcagccagtctctttcgttgggtatctctgtctgttgttactgcagcagaggcctgtcattgagtgtgcctgcttcccatgcctgtcttcctgtgtctccagcccttgtccatgcagcccacattaggactcttgtgactccacccttcagcttacagccacatctaccttcgggtgtctttatctctgtgcttcctgcccacgccagccttcacctactcctctgtcctgcccctgtacccatgtctgtccctgctgtgcctctctgccatgcatctgtagtcagtgagctccctttgtatctggatcccccgtgactgtagcccaggtcttctctcctgtgcctgcaactcatgtctgcccttgaatgtccccatcctctgtgcttgtcgcccatcagcagggcctaacgtgtttccactctcagtgcctgcacccatgtctgcctccagggtctccactcatggtgccacagtttgatttcccatctctactctcctggggtggattctggcatcatgactggggagggagaggtgacccataaaagggaaggctggaatgatgtcatgggcaaggagctgcctttggcgggggatgcacagtggtggagaagacatgagcagtcagaatcctccctgcattggggcgctcacgtggggctgtgcctgatgtggggagtaaggggaagctggagcaggaggtctggagccacctggccctcttgggcctgacacccttccactgcagggcctctatcacctcctcctgtggtcctgcctcctgggatcctgccctgcagtgtttctgcagggatcttctcacctggaacttgctgtggcaggtttcatgtgaggtagagtttagcaaatgttgattggcctctgtgccttacttttcttcatatgctttgctcattctgtgcgtgtttctgtagggtccttttttggttcctatattgatttgaaggatttatcttaaatctgtaaattaatccttgattgcctcatttttgtcatagatacttattctctagtttgatcgttatttactttctgttgatttcatactagtacacagtaatcttgttgataacaatcatgtatctaggatgtttttgtaacagttttggggttatggattgtctaagcatgtaatagtgtcacacacacataatgacaattttttttggttaaaaaaaatcctaatgccttttatttctttgttcttgctgtattgtttctccagtacaatgctgattaaagagtgatagcaggcatcctcgtctggtcctgcactgggggaaaaagcttcccatgattctctattaattatgttgtttgttacaggctcatattagacaaaccatcaaattaaagaagttgccatcttttatgttttactcagactcgtttttatggttcagttttaagtgttattaaatgtttttttaaaaacttaacctaaatgatcttattatttttgcctgtatttttgtgctaatgggatgacttacatgatttattttgaatgttaaggagccttgcattttggggtatattccacttggtattgatctgtggtttgtttgtttgtttgttttttgttttggtttatgtggtttttttttttttttttttttgagacggagtctcactctgtcgcccaggctggagtgcagtggtgcgatctaagctcactgcaaggtctgcctcccgggttcacgccattctcctgcctcagcctcctgagtagctgggactacaggcgcccgccaccatgcccagctgattttttgtattttttaatagagacggggtttcaccatgttagtcaggatggtctctatctcctgaccttgtgatccgcccacctcggcctcccaaagtgctgggattacaggcgtgagccaccgcgcccggcctaatctgtgttttcataggtggtttcattcatgtaatattttgcttagaatatttgtagctttgtttatgaaagaggagatacatactgtttatgaaagaggtgacctaattttcttcttttttgttccataatgcgtcctggtccaattgtgttctcaatctaatactggctccacacaaaactttaaaaatactatctttatttcccagcagtttgggaaattttggtgtttttctgccttgaatgtatggagtattctataattatgagcttggagttttacttgtgaaacatttttgtttgctgggtttcttttcaagaatttattcaatttgtttagtaggcaggagtttttctatttcatgttatgtttggattagtttgggtaaggtggtttttaaaatgtggtgcattttgttctctgttgagtttttagacctacatacttcttcaaatccttagttcttattaaggtctacaggctctgtaaagaatgtgtctgtgttgattgctctctcgtgtttgcgttaacccctcttttctctcttcatcctgagctgcctggagttgggggagggatgatgcaagcacccctctggctaccaccactgggactgcgctgggtcagacgtgatgccaccgtaatactgaatcttgctagaggcccgtggctagtactcatggctaccactgatgtttattcaagacccaagcaagggctctttcatcagcaagtaatgaaccctgccaggactgggtccttcctcccttcagggaagtgggctccctgctggtccagggtgtgtcttgaaatgtcatctgagagctaggccctgaatggctgcttcaggactctacttggtgctctgttttactgtggctgagctggtatccaagttgcaaggcaaaatgctttttactcttctctctcctcctggagctgtgagctgggctgccttcggctggaggaagtgtgatgcgaacactcccttggctacaccagcaggtgtctcactgggtcacctgcatcccaagttcactggctctgagcccagtgcagcaccagcccttgcccagcaatggcaatccttgtagcctagactggctttcacatttgtctaggacaccaaagcactttagcctgcagtggtgatggtggggttaacggaattcgggttttgattactgggatggaagattcccctctggctagggctggtctaaatgctgcctccatgggtgctggctgaattctgccttgtgttgctctccactgtgacagggcagcgctgagtttcaaggtaaagtcccacaatcactgagctctccctgccctgggtgcacagattccgtctaagcaccacgtgtggctgctgccgggagatgagggagaggtggtgtaggagatttgagattgtctttccccctttctccagttcctccttccttgatacgatgtgaaaaccaggcgctgtgaacgctcacccgatttttggttctcatgaagatgcttttttgtgtggatagttgttccatctggtgttagttcagggaggaatagaatcgctggagaattctatttggccatcttgctctgtctccaggtctcccctccctttcttattctttatcacagcttcccagtgaatgaccctgtagtgctgccttccagtgttcattcattcattcattcatcagatattcattaagtgcctcctgtatgtctgacactatgtagacacttggggatgcagtggtgaataaaccagacaaggtccctgtccccttagagcttacagtcaggttgtgcacatgaaatgtaactttaaaatattttcttatacgaagacaccctctgccccaatctagaaagaaatctgttaggcatcaagcttagattacttggtaaatatacagctatttactaatgttagttaatggactatagaaaagggacaatgatatttattacagtgttttgttttttcttttattgtttaacttttattttaggttcaggggtacatgtgcaagtttgttacatggataaattgcatgttatgggggtttggtgtacagataatttcatcacccaggtaataagcatggtacccgctaggtagctttttgattctcaccctcctcccactctccaccctcaagtaggccctggcgactgttgttcccttcattgcgtccatgtgtacttgatgtttagctcccacttacaagtgagactatgtggtatttggttttctgtttctgtgtttgctaactataatggccttatagctccatccaagtttctgcaaaggacatgatctcattctttttcatggctgtgtacatagtagtccatggtgtatgtataccgcattttcttttttcagtctacctttgatggacctttaggttgattccatgtctttcccactgtgaatagtgccgtgatgaacatatgaacgaatgcatgtgtctttatggtagaatgctttatattccttttgtgtatacccaataatgtaattcctgggtcaaatggtagttttaagttctttcagaaatcaccagcctgctttccatagtggctaaactcatctgcattcccaccagcagtgtgtaagtgttcccttttctctgcaaactcacaagcatctgttattttttgactttttggtaatagcctttctgactggtgtgaaatggtatctcacagtggttttgatttatttccatttctctaatgtttagtgatgttcagcattttttcatatgcctgttggccaggtgtaagtcctcttttgaaaagtgtcttttcacgtcctttggccactttttaatggcattgttttgtttttgctaatgaatttatttaagttccttatggatttctggatattacacctgtattggatgcatagtttgcaaatattttctctcattctgtaggttatctgtttactctgttgatagtttcttttgcagacagtggaatactatgcagcaactaaaggaaccacctagcatgatgtgtatcagtatggatacattgcaaaaacaaagctaaaaacaagctaccaggcatatgaagcacaggatggtagaggacaaactatactacaaggctatagtaaccaaagcatgatactcataaaaaaacaggcacatataccaatggatcagagtagagaactgagaagtctgcacatgtacaactatctgatcttcaacaaacctgacagaaagaagcaacggggaaaggattccctgtatagtaagtggtactgggagagctggctagccaaatgcagaaaattgaaactgggccccttccttacactttatacaaaaattaagacggagtgaaggcttaaatgtaaaactcaaaactataaaaaccctagaagaaaatctaggcaataccattcaggacatagacatgggcaaagattgtatgatgaaatcaccaaaagaaattgcaacaaaagcaaaaattgacaaatgggatctaattaaagagcttctgcacagcaaaagaaactatcatcagagcgaacagacaacctacagaatgggagaaaacttttgcaatctatccatctgacaaaggtctaatatccagaatctacaaggaacttaagcaaatttacaagaaaaaacattaaaaagtgtacaaaattcatgaacagacacttctcaaaagaagacatccatgtggccaacaaatataaaaagctcaacatcactgataatcagagaaatgcaaatcaaaatcacaatgacataccatctcacgccagtcagaatggcgattttttttttttttttgagatggagttttgctcttgttgcccaggctggagtgcagtggtgcaatctcagctcactgcaacctctgcctcccaggttcaagcaattctcctgcctcagcctcccgagtagctgggattacaggcatgcacaaccacgcccggctaattttgtattttttagtagagacggggtttctccatgttggtcaggctggtctcgaactcccgacctcaggtgatctgcccacctctcaggttcccaaagtgctgggattacaggcatgagccaccgggccctgcctacaaccatgattattaaaaagtcaagaaacagttgctggcgaggttgtggagaaacaggaacacttttacactattggagggaatgtaaattagttcaaccattgtggaacacggtgtggcaattcctcagagatttagaactgggaatactgtttgacccagcaatcccattactgggtatatacccaaaggaatataaaccattctattataaagatacatgcacatgtacattcattgcagcactattcacaatagcaaagacatggaatcaacccagttgcccgtcagcgatagactggataaaggaaatctggtacatatatgccatggaatactatgcagccatgcaaaggaacaagatcgtgtcctttgcgggacatggatgaagctggaagccgttatcctcagcaaactaacacaggaacagaaaaccaaacaccacatgttcttacttatatgtgggagctgaacagtgagaatacatggacacagggagggaaacaacacacactggggcctcttagcacagggtggggagtgtggagagagcctcaggagaaatagctaatgcaagccaggcttaatacctaggtgatgggttgataggtgcagcaaaccaccataacacacgtttacctgtgtgacctgcacattctgcacatgtgtcctggaacttataaaataaaatttaaaaatatttgaaaaccaataaaaatcaagatcattattttatttagctatttatttttagagatgggggggggcctcactatgttgcccaggctggactcgaactactgaacccaagtgatcctcctgcctcagcctcctgagtagctgggactacacatctacccagcaagatcattataatcacacctgtaccctctggtcaccaaaggatgtgaattttaagtggaggtagagggagaataggaaaactagatttcacagtgttccctactgaaacagtagtgaggccattctgggtggcctctgcatctgcttttgtttgtttgcctctgtcttgattccctgttgtctgtcattggaagaaaatccgagtctggacttgggttgcttcacatggacgttattttaatgataaatgataaaagacaagtcctgagtttccatggtggccctgaatagattcttctatgagacactgcgtttcttacgtatattctgagacacaggccaggttcttgtatgagatgccatgtttcttaggtatattctgagacatggaccagaccatgtagcatgaacctgatattctaggaaatctccgcatgggtcctggcggtttaggactccctatgctgcatcctgcatcttcaatcttaacgtcaccttttttttttttaacacagaatgtttcttttttgattttccagtgatttacaaacctacctcccaatctagcagtttaaccccttactacaaaacatttcaaaattttagaatgaaccaatgagaacatgtcatggtactgaaattaggcttcagaacatttttgtctgtcattgcatttggcaggaagtcagacaagtaccggtgattgccggtttcttgtctgatttttgcacttctctggcaagctgccccctctgaagagttgactatttgggagttactcactgatggttcagccacttccagaacctaccccaagagcaagacttgaaaccaactcgcaccctcaaagctccggaagccattcagtgtttccatcttggctgagtgagttcttcactgaaactcaatttgactttgacagtcatctaatgagaactcaaaagtcattcttggttcagccacagtcaaagaacttgcagagcattctctgacgaggtcctcaaggacaactgagagaaggtaagatccaaaaagcacctggatcctgacacaggattgcctggttcttaagctctgtttgcatccatgggcactcaccgggttgattgcagccaggccgatgggcaggagatgaagtgcccaagccggaatgcaagtcagcatttattagaggaacccagtacctacacaggtggaatgtgtctaacccatcgatgatcttcagtcctgttatattttcacagatattttatttcagagtcagaataactgatgttaaggtacatggggaaggaaggcggtagcctcatctttgtagccaaccagcagtatctcattcccagccctgcctcctacctctgttaaaagagatgggaagagttggtagttttcaaggttccttgagctctgctgttctctggagtagtcggctaacctttccctggtgggagagtcagaaactccagtgtcagctttaacacttgaattttctcttctagaattggtagtttagcacttttgcctatattttcaccgagctgattgtttttttctcatcagcgtataagtcagtattttattaaggaatgtgggttcttttgtttttttttctcatcgttttataactcagtattttattagggatgtgagtttttttgttatatggaggacggtttttgtttttttttctgaaatggcgtctcaccctgtcacccaggctggagtgcaatgttgcgatcacggcttactgcagcctcgacctcccaagctcaagcaatcctcccagctcagcctcccaagtaattgggactacaggcatgcacaatcatgtctggctaatcctttctaatttttgtagagatggggcatcactttattgcccagtctggtcttcagctcctgagctcaagtgatcatcttgcgttgtctcccaaatcactaggattacaattgtgagccgccatgcctagcgaagcatgtgtttttgtcctcagtatgttatgagccttttggccttaacatctttgtcatagacaattttatgttgttatataaactgccagtgtcatcttgtttctggttttttaaagatttactctccccaatcttatgcaaatatgctattaaatgtgttcatctattttatgtacacacatgcaggtgtttgatccacctctctttatttaatctgatgtgaagtgtgagtctttctctcccaggtagatagccgatcatgccagcgctatttattaccagaactgttctttgcccactgaattgacatcttaccttgacacggtttatttcatctacattcagagacctgccctagataacgcccctatttctttttcttttgagctctgctttaaaatatgtctcatgggttattagattgcttatattaatttatctttttattttaagttgtcattctccgtttatgtttccttattttatttatttatatatctatttatttcctttttttgagacagactctcactctgtcgcccaggctggagtgcagcggcgtgaccttggctcagcgcaatctccacccccgggttcaagcaattctcctgcctcagccttccaaatagctgggactacaggagtacaccaccatgcctggctaattttttgtagagacggggtttcaccatgttggccaggctggtcttgaactcctgaccttaggtgatccacatgcctcagcctcccaaagtgctgggattacagcatgagccactgcgacctgccttcttattttattgaatttcaaggtagatggtgtcagtgtcaaactctgtttccagtcatgaatttacaaatgtcggttctcttgagtgcagtttccccttcactttgtattataaaatacttgcatcgagcagggcatgattttgcctgtcaccttctcctgctgaaacagatccaggtgtggcagggcctgatgtttgccccaggtctgtgtctggattctgctcagatccactgcctttgcctgacagtgcctctgatcttctcatgacttaaacgcgatggaaggctcttgaagacgcatttatattacatattgggaggtacagaagctcaggtagagaagggcgagtgcctagtgggaaattcacctgtgcccagtttcttctctgcttggtgagcctggaatgcagagcccgctctctgagtctgtgtgtgtgcccctcctgccttttagatgtacactgtggctcttcctgccctcccccttgtcactactgtcctttgtgcctggggcccatggcctcctctgatgtcagatcttcttgttcctgatcctttgccagaacgcccttgatcttcttgtgctcctctccagcactggccctctagggtggggggcgttagtggaggtttcccatatctccattttctctggaagggaattgggggaaagtcctgtatttccgttttctctcactctctcagtagaaattcttcaaagtctaagcttgtagatgatacccgactacaagatttttactgtgtctttgattatttttgttgggatttgtagattaagatgctggtggtcaaactgctggcttatcctgtttgattttattgttatatatgcttgtatagaaatttgaaagtgaaattcagaagataattttttgacacctgagagacagagtacttcataatttatgtctcatgatagagtgacagatttctcttagatttgtttgtctaaaacagtaagtatttagagaaaattgcattccaggcaagggcatggaatgagcaaaggcacagaggcaggacataaaaaataaaaacaaaaaaacgtcaggtgcctgggtgaatagtccaaaaactagacgggcagaggggagtcttgggagatcaaccaaaaggcctgggctgggcttcatccaggtgttcaggaaagagcccggcaggtgtgagcgtgtggttgacatgacccacccttcacaaatattaatcttcctgttgtgaaggtagcagcggtgtcatgcaacgcctcccagagttaaccattgaatactttaaaaatcatcatataccaggagctcacctgtgcctggatcagaataaatgacaacataacgtgatgtcttgaggaaggataggttggtgcaaaattaatttttgccattacttttgcagcaccagcctatatttacaataaatgctacagacagtcacaaacatttgaagactctattctctaacataacaaggaaagaaacaaattagagatgttaaataaaagttttaaaggaaaacaattacagacatatacagacatatatgtgtatgtgcttaaatgagaagacacagaaggcagactggcgttcagtgaggagggccgtgcaccttgctgtgctccctggagacactgcctgcctgtggggtgcacatcacctgcagtgtgtgacagcactgggtggtctggcctccaactgtcgttctcaggcatgggttgtcagctcacaagagcagattactatataaaaataacactggaatatcgggagtattttttcttaaatatgcttaaaataatttttttttttgagatgtactctcgctctgttgcctaggctggagtgcagtggcacgaccttggctcactgcaagctctgcctcccaggttcatgccattctcctgcctcagcctcccgagtagctgggatcacaggcgcccgccaccgcgcctggctaaatttttgtatttttagtagggacggggtttcaccatgttagccaggacggtctcgacctcgtgatccgccggcctcggcctcccaaagtgctaggattacagatgtgagccactgcgcccggctaaaataaattttaagaagaaatactgtcagtattatttttagaaccttctatacttctcacagtacacttgcgcactacagaaaatttgagaaaacatggccaaatagagctggatttgcatcccagattcaccatttatgaaccacatgactcttgtcaaattttcatctaaaataaaggctaatatgtgggagttctgtggaaaaattaggtaactttagacacatggtaccatgcctggcatatacagtggagtcatatcagacacgtatttatttgtttcagtaaaattacctattattattataattttacatggtgggagcaagtagaacacatgcttcatttttcttttaaatgtggcccctaaacacaaaggagctatttcatctgggatgtaactaaagaaggagccaggccaggtgcggtggctcacgcctgtaatcccagcatttggggaggccgaggcgggcggatcacaaggtcaggagattgagaccatcctggctaacatggtgaaaccctgtctctactaaaaatacaaaaaattagctgggcgtggtggtgggcacctgtagtcccagctactcgggaggctgaggcaggagaatggcgtgaacccgggaggcggagcttgcagtgagccgtggttctgaggttgtgccactgcactccagcctgggcaacagagcaagactccgtctaaaaaaaaagaaggagccaactctgaaatgctggagggaaagtgaatgtgtgagacttactgagagatggtgtgtttataaacaatcgtgtttacaaaagcacatatttctgagtgactggagggattttcaaggcttatttgaccacatgtgtgattgttactttacaggttgagtttagaacctaacctcagccttacaggcagtaggtagccttgaacaaatgtttagccagtagtggtatcttgcagtttttcctttatttaatgaatttgctaagatatatctggctatatgcttaaagattttgcaaaatatttttttaaattattttgaaattctttaaaaagatttgtttattaatattctttatagaatacagagttttcttcattggaacagaggaaatgtaataacttcatttattgctagggctgttattgattctaaacaattctatgataggcttctgcaaggaatttcaatcttatttatgattaaagtacatactaatgaacacagtagcattattaataaccattttctttggttattcaattcaggctttgttttgtgaatccccctacacacacacacacacacacacacacacacacacacacacacatcgctgttgtataagacggtgggtatgtagtgggcatttctctaatgtgcttaaataagacagggttttctcatactgactcttactgttctagccaaggagactctgtttgaagcaagaaggcaggggtactggaaactgatttcttgtgtccttgcttttttcttgtgaagagtctaaattagtctatttatcatttgatattttgaattccagagaaacttagataactgaagggaatacctcagcagagtgtaggcttctctattttgttcttattaaattatcaaagaaggaaatgaatatgaattatttaaaataatcgtccttggaggtcttgggtactgagtcatttgaatggactggtaaggaggtggcccattttgtttgttgatttcaccttcctgagagtggctggcacagacagaggagatatttttctgctcagacctaacccgatttcattatctttctgcattcaccgcctgattttattctgtaaagtatgaacaccggtctgacttctctatatcttaccttgtcatttaagcatatgaattgtattatgtaacataaaggggaaaatatgaaaaccagttcctctcagtaaaccttttaaaacattatttaaaagcccagcctcctacaatttccaaagttcctggtaatttttttcagtggagttttcagtttactgattttttttttcactcagaaggggctgtgaagtcaacaattttaaggcagtgtggtttaagtgttttaagttctgtttctgttaaatgtattctattcatgtttacaaagcaacagaagaaagcttagagaattaagtacacataaatttaatcacacaagcttgagtagctagattaacttcaaaacgatcagtaaataatattttaaacttctactgaccttattaaaatacacttccagaaacattctgtttgaactattcttgtaaattagtcatcttgcaaaacagctgtgacaatatgatataatgaagagagcagtgatttagcaatgagaaggctgggagtccttgtcttggctcattcacagggagatcacatgacatgccaaagtcccctagatgaggaagccatgcattgagaggattgaggattgggtcaatgatctatcatagaatactttctatgagtctgtgcttaaacttagaaacctcacaaagaacacactggggaatttggtgcaagcaggagcttcacctcatgcagaattgcagtgtgattttagagtgctgttaccattcttatgcttagaaggcagagtgtcttcagttaggattctgtcgtgtttaatggatcccactctcgttggcttaggcagaaaggtgttaaatggtttgcagaattgttgggaaggctaagcttccaggagcagctcccaaagtctccacacacaactggaccaccagggaacctgctccctccaccaggacaggacttggaaacctgccaccgcaattaccagcaccagaaggatcttgtctctgctaagtctctgtcgacatagtgaataccctgtgccctgcctctctctccctgactcaggtcccattccaggtcttgcccaagtctttctgattggtgggacttaaatcacacccaaaattccagctgcaggagagctctgagatttcatctttccaacctctgtgtgctacgtgggggttggagcacttgctgacaagccttgcaaccaccattgacagtaagtgagatatttatgatcaataacatttgcatttttcacaatttacagtatagctgtacattttatttagagctagtatcaagtcactctacagataacaatattatttctgaccattttggaagaaaacagcttttttaaaattgagagcaatatctacattatttcctaaagagccaaagctgatagagaaaacaggatgttgaattttgaattttcctttcagctttatcttctccatgtcagttctgttttcttctgtcttttttttccatagggatgtcctccaccttttcaatctgatttgctctttgccatgcagacctgtggatgaagagccagagtcctccaaggtaaatgctcctggccagtggcctggtgtctgtgttaactgaacatctccaacgccctcagagtccacaaccaccattaagtcacttatcaagtcatttgacttgggatgcccaggtatttgatcactttttttctataagcaaagctccaaattcaaactttggcccaacatttgatatgtcaactgtctctactccaccctggctccacgttggctgttacaatcacaagggtgctttccaggtcctaccaggtgcagccactgcctacaggagcctggctgaggctccagggaggcgctgatggagagcctggcccatgaataacacaaatgcagcctcttcctctctacctcttccttccatccagttcctgccttgtcacctttcttttctgcctctcatagccattaaattcaggtcactactatttgcctttttgtcgtctcatgagaattacaagggtcagctggagacttcacctcctaggaaatgaggcatcacatctgtgcacctggccctcttgtaggcacccctggccatccccatcttgaacctgctagatgtttttctacctggtcttgtacctgagcacctgtgctaatctgtcactcctgatcttggtacattcccagcttttcctggaattgtctgatggactcacaattccactttagtcatgcttatctttatatatgagaaagatacgtagctatacttcatacatatactgtacacataaacatagcaaatagaagaaacagaatgtgcatctctctacagtaacatatatttcttccctggactgcaacaaatatgccattgaattggaagactgttgtaaaagttaatcctaggatgtacctagttgtctctgctaaaatagtttgcagctaaattagatgattagactgtgcatattgaaagacatggaagggctgggcgtggtggctcatgcctgtaatcccagcacttcgggaggtcgaggctggtggatcacctgaggtcaagaccagcctggtcaacatggtaaaaccctgtctctactaaaaatacaaaaaaaattatgtgggcgtggtggtgcacacctgtaatcccagctactcaggaggctgagacaggagaattgctggaaccccagaggtggaggttgcaatgagccgagattgtgccattgcactccagcctgggcaacaagactgagactccatctcaaaaaaagaaaaaaagaaagatatgaagccgaaagcccagtgagtgagtctgtgaaggtgggaaatgaattaacagtaacagtttgtgcaagaactttcctgttccttcctccccgaggcacctcattatttaaacatttgcattttactcagttatcctacatctaagactgatctccactcagccaactcctcctgccctctcatttctccaattcagctttagtccagaggagaaaaggataatagagtaaatgttacactaaacatcatgggatacttcttaagtcaccaaaaaagtaacaacaaattaagaagtattatttgctattttgaactggatcaacatataaatgttcccatctcttttcttggcaggtgaagctggactgaatatttctgtccataagactattagaatcccccaaagtgggataccagtgaggacctcaccagcagctgctgtctctccaatgcaggtagatgagcctcagaaataaccgctgcttgtggtttgctgtgtattcctctagatgtttttctttacacatattagtgagtgtggagagagagtgtgtatgtgttctgtaaatttgattacactgcgcatttattccgaaatccatttcactttaccgttggaacgtaagctctgtgagggcagagacttttgtttattgcacttgctgttagagctcttgtctgtaacagtggctggcacatggtcacatcatagtagaagctcaataaatatttgttgaatgaatgaaaaaatacgtccaagacatcttcagatttcaatatttggagaaatgattcattttttaaagaaagttacgtaatatatggtgatttatttagccactattctactgatagacatttaggttgttttgagtttaacttattacagaaacaatacagggaagatccttgtacaaatttttgatggttaaaggggctatttctgtataagggtatatatcaggattcatttgcaaatatcagagatcactgtaattaagcagaaaggaatttaatccagggcatttggtactagaagggctggagaaggcagtaggctccactgagcttccaggaagggttcccagagcatctcaatgctgacccattaaaagaccttctgtttctgccagaatcaggaagtctttctgtaggtgcttgcttaggaccaccagtgctgccaagatataggataagcctcgggatcacacaggcacaggtgcagtccgtacctgcaaaacaggctctgtgcctgcctcacactgcccagatgatggtgaaacagaccccagaacctctgctcccctgccacagaacagcaaatgcctttccagccatgcttgccaggagaagctgcagacgggcagccttacactcccttgcaccttccagatcctctaagagggggcctcttcgacagaaactaggccacttgatgagccaagcttttaagactttggcaaatacacccttcaggcaaatacatcctagtctcttatgattcagtaaatcaccctacaaagagatgaggatggagtcgagtgagcctttgctgagatcttccacacattgattcctagaaaaggaaaatggagtcctagagaaggaagtagattgacctgtcccggcatgttgaaaaacttgatagacacattgcccttcagtttgccctcccactcacagcatgcaaggtactgttttcccagaattttcacactctgtaaataattttaaagattaagtaaatgaacaatgataacttgttttgctttgttcatcagtaaggttgagcacttcttcatatgtttagaggccatttatgtatcttttgtatgtgtctatggaaactcatatacttggcttgtatttcttttgaggtgttagtctgtttcctggggtttttttttttttattattttaatttttttgagatggagtctcgctctgtcccccaggctggagtgcagtggcgcgatctcagctcagttcaagctctgcctcctgggttcacaccattctcctgcctcagcctcctgagcagctgggactacaggcgcccgccaccacgcccggctaattttttgtatttttagtagagaccgggtttcactgtgttagccaggatggtctggatctcctgacctcgtgatccgcccgcctcagcctcccaaattgctgggattacaggtatgagccaccatgcccggccatctttttcctgtttataagaaatcttgatatattgtgctttttaactttttttcatatgtagtgctattatttcttagtcatcttttaactttgtttatagttatattttactgaagagaaatgttgcctttttgtgttgtttttctttgattttaagtgttttgtttccttccttaaaatgtctttctagctattagtttattaaaatattcttccttagcatctttaaaaagccttttatttgttcagtcttaaaacccatagaaacatgggctttggattttgatgatcttctcctatcttgactgtcttctggaatcaaatggatactctggaggaatattacatcacctagaacctcaaattatagccatgttttatttttattactgtacacaaaatagaatgagtttctgtattcatcttctttcttccctttttaaaaacttttcagttcaggggtacatgtgcaggtttgtcatataggtacattcgtgtcgtggaggtctgttgtacacattatttcatcaactcggtattaagcctcgtaccgattagttatttttcctggtttgatccctcatcccaccctccaccctcaggtaggccccagtgtctgttattcccctctatgtgtccatgtgttcttatcatttagctcccacctataagtgagaacatgggtagggatgttttttattaggcaaaatgcaggaatggataccaaggtagggaatgtgggctgggctgtgtagagcacgtggaggggtggggggctgcaggtcaccatatctgctggcgatggctgtcttgagtcatgggccacccggtgctctgaccagtggcagcaaggctgtatgaaccagttcagttttccttcctgaggtgggacagtcacaactttggttggatattttggctcgcctacggccagttcctggaattctttaagtaaaaggcaaggttaagcattatgagagcaccaaagagcaagctttttttttttttctataaaggtcagataaggaattgatacctgatacgtttaagcctttttgtgaaatgccatacacaaagataaaagcgaacaaaatgtaaatgacagtttcttgaatgattagaacatgaaaagtcatgcagtcaccactcccgtccagaagaggagcagcgccagctcccctagacctctcctacgattttcccatcgtaaccctcactactcccaaaggtaaccgttgcctcacaattcttctctttaacagatctttacaaaactatgcagccctaaacattatgttacttttccttacatctgaattttatcacaaatggaatttaaaaactatgtaatatttacatctagttttttttacacattattaagttagtgagatgtatccatgttgttacgtataccgtaatttgttcattttcttcaattaaaggccattgtatgagtatacctttatccattctgtcattaatggacagttgagtcatgtacagtttggggctattgtgaatagaactgttacgttcttatcgatgtctcttgagacatgtatgtgctcgttcctgttggttacatacttaggaatggaattcctgggccttagggtatgcatacattctaggatagtgccaaacagatgactgaagtatttgtataactcatgtcttttcagcaatttatgagaggtctgtttctctgcattctcatcaatacttagtagtgtgttagtctttttactggcggtcatgtgggtgatgtgtagtagtgtctcactgtggttttgatttgcgtttttcttttggctggggaggctgaacactttttctttttttcttttcttttttttttttgagacggagtctcactctgtcgcctgggctgcagtgcagaggtgcgatctcagctcgctgcaacctctgcctcccaggctcaagcgattctcctgcctcagcctcctgagtagctgggattacaggcacctgccactacgcctggctgatgtattgtatttttagtagagacaggggttttaccatgttggccaggctggtctcaaactccctgacctcgcgattcacccacctcggactcccaaagtgctgggattacaggcatgagccaccgccccccccactggctgaacaccttttcatatgcaaattgaccatgtggatagtgccttttgggatgcacctgttcaggtttttttgcccattttgtttgtttggggggtgggatttattggctctgtaagcaggatatgagcttttgcccatttataaaatcagattctcgttgttttccttattgctttaaagagttctttatgtagtctccatataagtcccttgtcaaacaaatatgtggcaaataccttctcccagtgtgccttaaattatcttcttttgatgaacaaagttcttaatttaattaagtctaattcatcagtcttttctctaatggttagtgctttttgtattctgtgtaagacattgtttattccaagatcgtgaagatattgtcctgtgttttcctgtaaaagctttattgttgtatatttcacattaaatagatacgttctttaaaattgccaactcctactgcatccttacaacattttgctaaaacttccgacaattccagtgccacaacactcccttcccaggctgaagctttttgggaggtggggatggaaaatgaaagaagctggcaagaaaaacccaggcttggccgggctcagtggctcacacctgtaatcccagcactttgggaggccgaggtgggcggatcatgaggtcaggagatcgagaccatcctggctagcatggtgaaaccccgtctctactaaaaatacaaaagttagctggatgtggtggtgcatgcctgtgatcctagccattcaggaggctgaggcaggagaatcgcttgaacccgggaggtggaggttgcagtgagccgagatcgtgccactgcactccagactgggtggctgagcgagactccatctcagagaaaaaaaagaaagaaagagaagaaaaggaaaggaaaggaaagataaaagaaaaaccccgcctcagccaggacccagcacagagagtaaattagcggggctgggagtttctgccatatcagcagtcagatgtcttaaaaccagaatctacccagagtatatgtatcttgtatcttttccataacgttcttttcactttatgttaaagaagaaaaagaatcccagcactttgggaggctgaggtgggaggattgcttgagcccaggagtttgaggctgccgtgagctgtgatagcaccactgcactctggtctgggtgacagagggagaccctgtctccaaaaaaattaaaaaaaaaaaaaacctgtcaacgctactgaccaacaatagaggctctcaaggtgtaaactcacctcagatccctgtttgttcttcctgtccactctgcctctaccctgtttcaaagctggaccatgccatgaaggaaggctcctcggttacagcctccccgagcccgtcagccacgctgccgaggacacgggaaagaataagaagccagagggaggcggctgcctgcaggaggtttagcataaaggaaataggaatggtaatttgaaattgaagaaaacatttaaaaagagctgtcattcaagtatgacacccctgatgccacctgtgctgtcccccatctgacagaaatggactgaggcagctgccagaggggatatgaaaaagcaattaacattttcagaaggggtggccttctatggtgtaaccttgttgtactgagattgcagggaagagacacaaagtttccagtcatgatcacaagaatagtatttcctgctggagtgattttttggtttgtttttatgaacatcctggattagtttgcaaaacattttacatttgaagaaatccaaaactcattttgcctgaagagttatattctttcatcgttaaatctgtaaaattacaaatataagtgtgtgtctgctttacttactcttcacaaaatagtatgtgtctagatctgattgtcataggcttgttctctcagaattagaagccaaaagaaaaaaaagaagaaaaaaactggtgaaagtcagatggttcatagtctttttgaaaaccagtagccatgtgcattttacttaaaataactttatttctacctcaccaaaatacaccatggtaggttatgtctttccctctctctctttctctctcctccccatacacaacacacacacacacacacacatacacacaagttttagattcaaggggtacatgtgcgggtttgttacagtggtatattgtgtgatgctgaggtttgggatacagttgattccattacccagctagtgagcatagtacccaatggttagcttttcaggccctgccctccacccttcctcaccccttttggagtccccagtgtctgttcctatctttgtgtctctgtatactcaatattaagctcccatttataagcgagaaagtgtggtaaggttttctgttcctgcattggtcacttagaataatggcctccagcagtgtccatcctactgcagaggacatggtttcctttttatgggtgcatagtattccatggtgtatatgtaccatattttctttatccattccaccatcgatgggcatctaggttgattccatgtttttgctattgtgaataatgtgatgaatatacacgtgcacgtgtttttttggtagacttttcctttgagtacatacccagtaataagattgctaggttgaatggtaactctgaggttctttgagaaatctcaaaaccactttccacagtggctgaaataatttacactcccaatagtgtataagtgttcccttttctccacagcctcaccagcagctattattttttgcctttttaatagtagctgttctgactggtgtgagatggtatgttatctcaacgaagttttcatttgcatttctctgatgattagtgatgatcagaattgtttgtatgtttgttggccacttgtatgtcctcttttgagaagtgtctgtacatgtcctttgccaatttgttaatggggttgttttttgcttgttgattttctttatcaattctggatattagatacatagtttgcaaatactttctcccattctgaaagttgtttactccattgatagtttcttttgctgtgcagaagctctttagtttaattagatcccacttgtcaatttttggttttgttgcagttgcttttggggacttagccaaaaattattcaccaaggtcaatgtcaatggtatttcctgggttttcttctaggatttttatattttgagttcttccatttaaatcttcagttaatttttgtatgtggtaaaaggtaggcctctagtttcattctactctatatggctagccaggtatctcagcatcatttactgaacagggagttctttctccattgtttgtttttgttgaagatcagataatagtaggtatgcagctttatcttctcttccattgatctgtgtgtttgcttttatatcggtaccatgctgttttcattactgtagagttgtagcataatttgaatgccagtaatgtgatgccttcagctttgttcttcttttttaggactgctttggctattcagggtctttgctggttctatatgaatttcagaatagtttcttctaaatctttaagaagtgcagttggtagtttggtgggaataacattgattctgtaaattgcattgggcagtatggccattttaatgatagtgatgcttccaatccatgaccatgaaatgttttttcatttatttgtgtcatctctggtttctttcagcccccttccatatgttaactcagtaatgaacttgtgttcagggacatgttcagctccaggtaatattgtaggtgctggggattccacagtgaatgaaacaggcagcagtccctgctctcatggaacttaaacatcctcatggggtctggcagttaactgaaataaaaggtaacatatgtaccctatttgaaggttgtattgctgtggagagaaataaagcagggaaggagggttgggaatattgggtgaatggtacaatttatacacagtggtcagggagatgacattcaagcacttgctcccctctcttgaagggctttggtgtctgcatgaaggtttatttcccaccaaggcctaggtgtggagggtcagagtaaggaggtcttcactgccgtgactgtgccgataggatctaaagtgacacacggtgggagcctcaggtcagcagcactgggaagtgagcaccacagccagacccacctgccaagccccgggccagctgtgtgacgtcttgagtggcccaggattgagacccagtgaaaggatgtgagtctgcccttgctatgaagtgaggccctcactgagctcaaaatggcgctcctaggaggcccttcctcacattctgctcaactcagccattttccaagccaagtgggcagccctgacccagggaactcatactcctccttttctttcacctaaaagtctactttgggctcctagttttgtgttctgatggggaaatttccatctctaatgtaatttccagtaagaattctgaagggacagaaagctgagatgggaatatgtcagaaagaattctaaagataacccccatgactctccctggtagaatgtcctcccctttatatgacacagggagatggtctggatgtgccccacctaatcacagagccctgtaaaagccaagtgatgtctctggcttgtggcagaagttggggaaattcaaagcatgagaaggactctgcatgttcttggtggcttgaagagggaggggcatgtgaggagccgagaagggcccctggctgacagccagcaggaaacagggactttctagcacgaaaacattagtgctgaggtcctagcaatgcccagaaattaccatgtcagtgctctggagttttgaggttgacaactccaagtgtggtgccaccaggtcctttgtctcctcctctgtcctgatgccctcagacctcagcaaagccaaggatgctcagtttgctttgccttctgctttccctcagctgggggatcttgggctggaagtcagtctgatgaatgtgtggaattcaactctaagtctctcctaagttctctgtcacctcccaagaagcatgatgaggcacagccaccctacacttccatgggtggcaccttggctgcattccttggtccctgccataccactggacccttggacactggtgaatcaggcaagggcatggattgagtccctacatctcacctgtatctccaaagttggaatccataacccttagcaagttgtaatgggatgtttaagagttttaaaggccgctggtttcctgagtggaattagaatattattagagcagtactgtagcattagagccagctgctccgtgaggtggtgagagtcctgaccctgggggtgtgaaaacaggaggtaaggagggacacaatgagggcatcccgtagtgactttaggcttgctcatttccgcagacagaaaattcctagcaatgggatctctttattatatcgctcttagaaacccacctgccagatcccagctgtggttttgttactattcattgacaggagtaatgaaatttaaatgttacaaatacagctaaaggcctctttgatgcagtcctggttccctcttgcctcacttggtgagagctggtgacgtcatgcaagtccttgcaggcttcttatgcttcacactcagtgtgtgtgttcacagacaacacagcactgtactgtgtgtgtgtgtgtgtgtgtgatctgtttggttttggtattgttttactaaaagggatcatactgtaaggctcatgctataaactacttttattcacttagcatctgtcctaagagcttccagatctgtctcgttaactgtggcacagacttctgactctggcctgtgcaccctgcggattcaggcatcctctgttgcatggacatttacattgcttccagtttctggctgtcattaggggactcactgaggaggagaatttcttggcgggtgggttaggtttggggtctacatttaactgaccctggccagttgccctccagaatgctgctgccagctccctccctccagcagggcatgagtttatgtttctgtagatcaccccctgcccctgatgttagcaaacgttaaaactttgcaacctgattggtgagttactttttcattgtttagttgtttttttctgatctgagggacctggcgttttctgtgtttgctgaccgtctgcatctcctctcctgctctgtgcaccatcaccctgctccagctgcttcctggagcctccctccttcctctccacctgcccgcgtcctctttctccttcagtttcttcctaagggcccatgggctttctttggcttttacgttcttctcactccgcctttggctgttgctgggcctcccatcccctgggaggtttcagaggatggggaagacacaggagtgcagtcaccatgcagtgcaatatgggctgtaatgttaatcctccacggcctttattgaggacttactgtgtgccaagaacctgctctgagaacttaactgtgctccctcccttcatgctcataaccacctgtgagacaggcaatgttctcatcccctttcacacagagaacatggaggcacaaaggagtttcataaattgccactaaggccgtccactggtgtgcggcagagtcaagattcaaacccaggctgtctggctctgggtttcctctgttaggtgtcagatagggccaaggagacacagagaaggagcaccacctgacttgggctggggcagtcagggatggcttcctggaggaggtgacacctcagtggagccttcaaggaggagctgaccaggctttgaatgtccaggaagagtgaaatgcctgagtgatgctgggaggctggagagctggcctggctcgggttgtgtgccagggggcaggagatcaggactaaggggtggccagggtcagatctagaagacttgggccatcccatagtcaatacctcatcgcaaggccaggcaggccttccactgctctgtttgtaccccatgggacaccaggagcctgggccgcggccacccacctgggcccctgagacccaatgcacaggcatgggggcgggagtgggtgtggctgatttacatccaacaggttgaggggaaaacccaggaagtgcagcccaggcaataatcaaatctaagactaataataagcatcctgagtagtgagtggcctgggctggagtgggcaagctggccagagtggatggaccaggaggagccgtgtgagtagccaggcaggagggcaggtgggaggtgtgaggagggttgggtctgagtgccgtgggggttggcagggtccagtaggtgcaaggcccacagcagatccacacactggggcagtcccagcctccccaagcccctgcacatggagagccccaagtctggatgcctctgggatgtggggcttgccttctgggagagaagccactgaggctacagggttggccacaccggcaggaattccctttgtcaccatggcccccgcacagcctccattttcccccttacatgcccgctggaccattttaatgctaatctcaaataccagattgttttgagttgctgagactgcaggatttattccttaagaacacaaactaaaaacaaaaaactaagcatcatacaattcctgctaaaacaattcctaaacatcatcacataacccgccagggttcaaactgctctgactatctcttcaatgtctttctcagttgatttgttcaaatcaggatcccagcatagcccacattagacatttggctatgttttaatctataacagtttccacttgtttttttcttggttggttggtaaagatactggactatttatactgcaacatttttatcagggtaggtttctaaggctttatgaaagggctccagatccttcactgtgcagacagaatccaaggctggatggacctagggcatagcctagattcacagcctctccctgcagctctgtccccacactccaggcagagaacaaatctgttctctcatcctcttttgtgtcctgcgaccacatccccagaatctacccagccaggggctcaaatacgtaatgtttctctttctgagagagttagacaaggcagtgaccagaggctgccttgacacaggatgaaattgcccagagccctggggccgggagtcaagacccagctagaactgtgacctggcactagcagaggccgcctggtgctgcagaatcacccctggccagttgttcagtgacccactctgagaccttggctgagccacttcccctcagtgtaaaatgaagaagactgtctttcctaccagatatccctcaaaaaaaacaaaagtgctttgaacctgtcagatcccctgttaaagagtcacaaggaaaggctctgagaagacttgcagttaaaaaaatcctttggcttcctttaacccagagatttttcaaggtaatttgaccacagagaactttcttggtgcagcagctgttaactagccaaacgtgtggaggcacaagcagagggctcagagaatcaccctctttggctgctctctggtttcagggtgcaggggagagtctctgtcctgcatccgagtctgcagcagcctggagtatgagcccagcccacagagctagtgtccaagaggagttccctttcttccctttccatcaatggagcttctctctcaagcttctattctgcctggctggtgtcaatcttggggttttcctgccctcctttgacacttgatggtggttctgggattttgatggtggtggaggagggggcagggacaggccctctggtcagcttggcatctgccatctggtcagtcaggcactgtctctccataggtccggtggctttggtggcttctaggccatgaatgggtcttggaacctctccaaggctgcccttgtcacatagaacctgctgcccacgttccactcaaccatcccttcacggtgatatgtggtgggtggtggctttctccctctttgctccccccacccaaaagggggaagaatcaggggtctgtctttaattttgtttgatcctttgattttacatttgcttttaaatatacagtagagtcagatggtttgaaacccagaaagtattggaagatgtataatggaaagtctctttcccaccttgtcctccatctgcccagttcccacctcctctagaataagcaacattattgaggtataatttacatgccatgaaattcacctgtgtaaagtgtacaagtcagtgttttagagttgtgcagccatcaccataagctaattttagaacattttgatgaccccaaaaagaaactttgtcagtcttcattcctccccaaccccaggctaccactactctctgtctctgtagatttgcctgttttggacattttccataaatggaatcatatgtggcgtattgtgactagctgcttccacttggcataatgttttcaagggccatccatgttgtagcaggtatcagtacttgcttcagttttgtggctaagtaacattccactttatggatatgtcatatggcttttccagtcatcggtggatggacatttgggttgtttctactttttggccactttgattattaacaatgcttccatgaacttttgtgttaagattttgggtggacgtgttttcatttcttttgagtagatggatacctagaagtggaattgctggatcatatggtaattctacatttagcattttaaggacctgcaaactgctttccaaagtggctgtgctattttattttattttatttttatttttattttatttatttatttatttatttatttatttatttatttatttattgagacggaatctcactgtgtcgcccaggctggagtgcagtggcgcgatcttggctcactgcaagctccatctcccaggttcacgccattctcctgcctcagcctcccgagtagctgggactgcaggcgcccgccaccacacccagctaattttttgtatttttagtagagacagggtttcaccatgttagccaggatgatttcaatctcctgaccttgtggtccgcccaccttgggctcccaaagtgctgggattacaggcatgagccactgcacctggcctattttattttttaaatttaattattttattttatttattttaatttttgttttttgttttttgttttagatagagtctcactcttgttgcccaggctggagtgcagtggcacaatctggcttgctgcaacctctgcttccctagttcataagattctgctgcctcagcctcccaagtagctggaattacagatgcccactaccatgcctgactaattttgtatttttagtagagatggggttttaccatgttggccaggctggtctcgaactcctgacttgaggtgatccacccacctcggcctcccaaagtgctgggattacaggcatgggccactgtgtctggccggctgcgcactgttttatagctcatttcatgcatgagggttctgatttctccacatcttcactgacacttgtcattgactgtctttctcattgtagccaccctagggggtgtgaggtggtatgtcagtgtggtttggatttgcatttccctaatgacaaatgatgttgagcatcttttcatgtgctttttggccatttgtatgtctttttttgggaaaatgtctattgaaatctctagcccatataaaaattggattatttgtcttttttcagtattctgttataagcattttttatatattctggatacaaactccttatcagatacaagatttgtaactatttcctccaggtttgtagattgtctttttactttcttcatgatgttctttggaacacgaaaggttttcattttgatgaagtccaatttttatccatcttctcgtctatcatgcacatttggcgtcattgcctaaccccaaatcataaagatttaattccatgttttcttctaagagttctatagttttagctcttacatgtaagtctgtgacctactttgagctcacgtttgtgtgtggtgtgagaaaggggcccaagttcattcttttgtatgttaatatacagttaacccagcagcatttattgaaaagactattgtttctctcattgacttgtcttggtacccttgttgaaaatccattgatcacaactgttactctaattatattctgttgatctatgtctgtcttcatgccagaccaccctgccttaattagtgttgccttgcaataagtgttgaggtggggaaccatgagtcttcatgtattttttctttcgattcatgaacatgggatgtctttccatttattgaaatttttaatttacttcagcaatgttgtatagttttcacgtcttgcacttcttttattaaatttcttcttaaatgttttatttaaaacggtgtttttggtttcttatttttcaacaggatttctttatgcgtatatgatcattcacaaaatacagatcagagcttccccctttttgcaaaaacaacccccgaaataaaaacagagcctatgagccatgctgttatataccttattttgtttttatttttatttttttagtcaatatgtcttgctgttctttccatagcaacatataaagagcttcctcattacttcgatagctacataaaaatctagtgtataaatatactgtaatttactcagtcaattccctgccgatggttgttgggttacttttagtcttctgctattacaaatgttactgcaatgaatttatcatttcacacttcaggataaattgcaaagtttaatcactgggtcagtgggtaaatccctcagtaattttgacaaatgttgccaaattacccccatgggggttatttctgtttactctcctttcatgaggaataagaatgccactctccccatggctctgccaaaagaaggtgttactaaacttttggagttttaacaatctcttagggtgaagatggtatcagtgtagtttgaatttgccgtctcttttgaatgaggcaaagcatccttatgttgtattttcctgtctatgaactgtgtattcatgcactttgcccatttttctcttgggtagctggtctttatttttccgtttattctttagatttgagttgcaaaggttttgtgcctgtttttcatatgtctttggacttaggtgtttgttgtcatgaagaagtttttttgtttgcttgttttgtggattctatattatgcatcttttcttttatggattttgggtcataattagaaaggcgtttcatattccaataatgtaaagaaattatcaaatggtttcttctctattaactttacatatttttattcttttcacatttaaatattttattgggttgggtcttgatctgagggaagttatttcctgtgcctgtttctggcccagtcactttgtgccaagaatcctttctctgaagtgttgaaagcaacagccaggactttcccatttccccaccagggcacctctctggatggagtcctccctggatggaggatggaggagatgcaggcagggagggagctgctgatgaaactccgtatgatccctgcccagctgtctatcagcacagtgcaagaatgtggcttgcttttccttccacaagcctttactgaggacaactatatacaaggaatccagttactgattagcatttatccagcaactgctgtgtgcatgctatcatggaaggcactggattcagagacaaatgagacagtaggaggaggcagaatggctacaccctgaaatgtcaccaataagaaatgtcacccagcagtgggtgctgggaattcaggttctgggagtagttcaggttctgggagtagttccctcccaccaggagcactaatttgatgctactattattaataatcatcattggctgggcacgggggctcacacctgtggtcttagctacttaggaggctgagtggggacaatcgcttgaacccaggagttcaaggctgcagtgagctgtgattacacccctgcagttttgtagagacagagcaacaccctgtctctacaaaaaattatcgttaatattataattattttatattattataagattataactattgacccattatatttcatactatttatatcacagtaacaactaccagtagtagcagccgtgtcttgggccagttacatgcttgtcatatacacacccttgagaagagctagaaaaggaagcctagaattcccattttacaggtcaagaaaactgaggttttgcttggcccaggttcttcccaggatgactcagctgtcctttccccaccacaggcacttcactccggcacactctgggttactcatccatggtgaatccattttcaacatgagctgacaggagtcaaaaattatgatgggtagaagtggttgtccccatttcacaaacagaaaactaagaaggtgacttgaccagttcacccaggacctaattaagtagttcttcctttagaactagcatggggatggtgggctctcaaccctgaaaatctctgaaggttcattctgggtggagataggagcaggcaggggtgggtcttagtgccattttcaatatttcaaaatagccaggtgagaaatcatatacagctcacagaaaccaaaagcatcttttcctcctcctccatcatcctcttccccctcctcatctgtcctcctcttttttccttcttccacccttgtgtctcctcctcttcatccttctccttctcctctttttcctccttcctctccttcctgattaacagaaaccagattgtaaagtcgtcatctattcccatgcacgtcgcccaggtctcaggctgcagcctcatccaggcacacatgccgtgtcgtcacactggaatgctctcctgtgcccacctcattgatgagctcagctcatagcccccaacccaagtttgcactcagtgtttgcttgaaggattgagtgagaaattcctcctatctgccaagctttactgtctttttccagtcacatctgcaggttttcttggtgaaattgtaaagggcaagaacaaggagctgacgtctccccccaaccctgctccaaactcctgcacagacccctccccaccaaggaggaaaagatggagttggctcacgccaacaggaattggcccctaaatttttgtttcctcagtgcaggtgtgggccttgtccagcacagcattctgtatcacagagagtggcagtattgataagggtagcagctcaggaggttaaacctttactaacatgcttagtaccatgctaggcacctgccatgcatatgctactcacaatgaccctgtgcagtaagcaacagcatcctcattttacaggggaggatgctgggtctccaagaggggaagttgtgcccagggtcacacacacaggagtaccaggcacgtgatgcacagtccagggttcccaagcagggctgccccatggctttccccaggctcatccccaaaggctcagaaactggtccactccccatgctggtccttcacttgtccattttagacgctctggattgatttcctactttctaaggtgaggacttggacgtcactatctgcatgcatgcagcctcccttccccaggcccccagtgaaggaggggtgcgtgttcagctggagtcaaggcagacctgctggctgccagctctgctccagaatgtcaactcctctgcagtttagttctcttccctctccttcctctctcctagaaagcctgtttttgccttcgttcattgacggtggcctaatggctcatacagtgagtaaacaattttacagaagaaataattccacagatagctcacttatttatgatgatgtaaatactgcccacacctgagctgtacttttaccattttaatcgttatgatgtgtacagtaaagtggcattaagtacatgaacaagtaccactatcgataccaaagacttttctatcgccccagacagaaattctgtacgcattaataacttctgcctgtggtaatctctgttctactctctaactctatgaatttgcttcttctactttcttcatgtaaatggaattgtacaatatttgtctctatatgattgtcttatttcacttagcataatatcttcaagttcatccatgtcgtagcatgtgtaagtattccattcattttaacaactgaatagtatccctccgcgtacctgtaacacattttgtttatccattcatgcgctgataaacgattgggctgtttccacctttggctgttgtgaatatgctgttctgaatgttggggcacaagtatctgttcacatccctgtttcagttcctttagatatttacttaggcgtgggattactgggtcatgtggtagttttatgtttgtctttttgaggaactgccagacttttccacagctgttgctctgttatacattcccatgagcagtgccttcacatccactttcttcacatcgctgaagctgcttattttccatttttttataatagccatcctaatgggtgtgaactgatatctcattgtggtttcaatttgcatttccctaatgaataatgacattgagcatctgttcatgtgcttattgaccacttgaatgttttatttggagaaatgctgattcaagccttttgcccagttttgttgttgttgttgttgttgttgttgtttttagatggagtctcgctttgtagcccaggctggagtgaggtggcgcgatctcagctcaccgcaagctccacctcccaggttcacgccattctcctgccttagcctccctagtagctggtactacaggcgcccgccaccatgcccagctaatttttttgtatttttagtagagacagggtatcaccatgttagccaggatggtctcgagctcctgaccttgtgatccacctgcctcggcctcccaaagcgctaggattacaggtgtgagccaccacacccggctgccttttgggtagttttgacttgtgttgtttggatttttgttgttgagttttaagagtgtggggtttttttttttttttgcttttgtgtttttgttttgagatggagtcttgttctatctccaggctggagtgccgcggcacgatctcagctcactgcaacctctgcctcccgagttcaactgattctgctgcctcgcctcccgagtagctgggactacaggtgcatgccaccacgcccagctaatttttgtatttttagtagagacggggtttcaccatgttggccaggatggtctcaatctcttgacctcatgatcctcccacctcggcctcccaaagtgctgggattacgtgctcctaaattgcatgataatgtatgctagtatttgagactgtattgcaatgatgcttgattgactctttcagtctggaagccaatgtccttcacatcattagtcaacctttggagttcctgaaatgattccataatttcgtatcttttgtctcctgttttctgaacaattattcaattacatctttgagcttttctactgatatttttattctggctataaaataatttcttataattctcatttgttctacgaacgtcctttacaatagtctgctgttttgtttcttagatacacaatcctctcttatatttctggggatctcaactcttgctgctcttgttttaaaatgctcttctgtttcctgcgtgtcttcgttggcaccaggtgtctgccttctgtttggtttgagtttgctttcctgctagaggcagtgctcccatatcaggtgacccttggccattggttcacaagtcagactgaggcactgacagctgcctggaagttctgggtaagcagatgggctcactcgtgtagaagctttgctccagtgggatcaggcagggacttggacattttctggagagaatctcccgctgtcagtgcctctgggtcttttcctttgggtctgttttcccagagcagagacttctgatttcctgccagtttcagggtaggaaggcaggtgtctttaaaaacctggttgccgtactccttaggtaggggctggggtgagtgaagagaggggagactgaccatccaagaggaagattttcacagtctccctgttgccaggaaggaccacgttgctaccctcagctgtgtccaaggagaccccactgttatgcccgggcgggtggagggactggcacctgccttggaatggggatgtgctgtggtcacgccctctttatgtaagttttcaaccaatcctctttcagagcttcctgcctcctgcccagcccctgctgtcagagatacttggtgcttccagttctggagacttccttgagttctgtgactcaaaacaacttccttcccctgtgggcatcaacaatgagagatcttcagatgcgatcaggcactccagtccttccatctcccacaatgttggagacctgtgttccctgctgtagaaacctctgccattccctttatctctgaagacagatggacttgactgtcagcttagcttggtttcaggaggaaaggaagataaacccctgtgtttaagctgccgtgttaaatgggaggcacctggtcttttttctttttcttttttaaagactgggtctcgctctgttatccaagctgcagtgcagtgatgtgatcatagctcacctcagccttgaactctcaggctcaagcgatcctccagcctcagcctcctgaattgctgggattatagcacctggccaattttaaaatctttctgtagcgacaggatctcactatgttgcccaggctggtcttgaacccctggcctcaaggaattctcccacaacctcccaaagtgctaagattacaggcaagagccatggtgcccagccacctctggtcttccctcagtttgctttcattaaaggacaaacacatgccttgcaaaatgcttttaaacatttttaaggagaagttgttgggggaagcaaatgtcatgaaatcagaaaaggatggagaaggtgatgcatgcacacagtggaagactcacagtaacacaaaaccagacacacagagagcacccacatggatgagtctcaggcaccacgtggagggacaaaaccagacacggaagttccagaaggggcaatattaacctatgggggtaacaacagaacagtagctgcctctaggagtgggcattgggtaggaggggaccccagggagtcttcggggtgaggaaatgtcctacgtctccatgtgggctgtaaagacacaggtgcatacatacatcaaatttcaccaagctgtattcttcagctttttgtgcaccttacacacatcattgtggttgtttcatactttagtaaaaaagaaaatggaaaggaaattgacatttcttggttcttgctgtgtgctaggcactgacttggtccgcacttaaagaaaccattcacttaatgagcaggtgctgtgtcctaagtactatctaggttctgaggactcagcaattaataagaaaaattaggcacagtccctgccagatggtgctcacagttagtgtaggagccagcatcaaataaccacacgcacagaaggaaagtgaccacagcaacaggtaaagggcagtgcgagtgtgtagaagaaggaccgtgtcctagtctagggggcaagtcagaaaggcttccctgggagatcaggtttagacagaggtctcaggttgagaaggaataagcagctgaggggcaggggctggggagaagggcacgtcatgcgagggaacagcaggtgcaaagaccctgtggcagggagaggagcggcacgttaaggagggcaaggggcagggcccagcagggcactattgatgtgagagagcagggggcctgcaaaccatttgcagatagggaaactgaggctggagaggggaggtggctgccctaggcctccagccagcacagtgggagttggaagccagctttctctgccctctctgctcctgagacagcacttatgtctatgggaaagtggacagcaagaggctgggctgcgaccacctgccagctgccctcacgcttctggtctctcagctccacagggcctgtgagcagggctggctatgagatcctgccctgaagagcagtactgggctgctctgctaggcacctgcatgtcctgcaaagccatctgcaaccatcagagccagcgcacctgtgcagcctcctgcggtgagttctgggacctgagcccaggggacagtgtgatcacccccaacgcctgtccccagagcaccctctggccccacagtcaggtggctgaggagaggatggcaggaggagatgtacagtgtggcacctcttatccctccaccttcctgctctggccacactgcctcctttcagtgtcgaacatgccatgttcttccctgcctcgggttctttgcacatgttgttcccgctgcctggaatgcatgctctctatcatcttccctcagctccctcctacccaactttcaggtctcggcccaaacatcgggggtctcctctgaccacacagtagtactgggccctcctttgtactgctagtgttactttcttttgaaacttttaattacagaacttaccacacatatacatagagaggactgcacaatgatgccctcctcatccattaccagcttcacaaatcatttaaattctgccttgtactttcccaaccagttgttttggcttgtgtattttaaagcaaagccaagacctcatatcattttacctgcagatactgggccataaagatctgtaaaacataacccaaatatcctatcactgccagcaataatttattaacatcatctaatattcaggccatatccaattttccctgattgtcttgaaaactatccattgcttgctgttctttttcataatctgtctttttccttgatagaacttaccacaatttgctgttttgttcttttgtgtgtatgtgtttcacatctactcagccactggactgggtgctccctgaggggaggaaccatgtctgacttgaacctagcacagtgcctgacacatagtaagtccttcatgaatacttgctgaggggaactcagagaggctgagtgacttacccaagatcacacagcttaaaagtgaagatgtcagggtttgaacccaggactctgactcctaaatcataccctgaaccgttacccattaatgaattagaacattcattgattcatcccacaaacatagatggagtgctccagccccatggaaataggaatctggtgtggcccttcaaggacagtatcatctaatgggagaaatgattgtgtgtcaaggtagaaagccatagttggggccgggcgtggtggctcatgcctgtaatcccagcacttcaggaggccaaggcgggcggatcacctgaggtcgaaagttcgagaccatcctgaccaacaaggagaaaccctgtctctactaaaaaaaaaaaaaatatacaaaattagccaggcgtggtggcacatgcttataatcccagctactggggaggctgaggcaggagaatctcttgaacccaggaggcagaggttatggtgagccaagatcacgccattgcactccggcctgggcaacaacagtgaaactccgtctcaaaaaaaaaaaaaaaaaagccacagttgggagagaccaccttcagctggcggcggggggtagcagggaggtgtccctggaggaagcaccatcagaggcagattgttaagaggccacagaatgcagaaatcagttgaaggggaagggtgcctggaagagaggacagcatgagcagaggtgggaaacatagcggggaagactgagtcctgggtgggggcggggtggggtgtgaggtcaggcagggagggtcagcggtctggggcgctcaggcaccacctgcaacagccatactgggaccactgaggaggggaggaggtcacagaaagcctcaaggacaccactgctgggctgagtgtgccaggagtggaggtatcagtttctgtgcagttcactgagccctgggatagggcagggccagagtaggggaggccccatgtgggccatctgagttttcttcgaggttccaactccgtggtcttttaggtccgtcctttactctgtcaaagacacaaggacaggtgtgtatttactttgtgaagaggctcaaatgagtattctactcaagccttccattaagtggacatttagtatgtgccaggtgctgtgctgggcacttcaactctgccaacgaccctaagaagtcagtactgttattttccctttattggaaatgaggaaactgaggcatggagaggctatgaccacactgcctgcaagtggtacagccaaggtaggctctgaaatgtgggttcttatccactctcctgcaatgcctctgaaatgtgtccttaaaatatctctgtgagccacagagggaccatctcctacaattaagaatggctattggcagccgccgccgcccgaccgccgggaggatggagttcagcgggcagcggagctgtctcagtctttgccgccgcgccggcgagcgccgcccgggaggcagcggctggaggagcggacgggccccgcggggcccgagggcaaggagcagccgcctgccttggcctcccaaagtgccaagattgcagcctctgcccggctgccaccccgtctgggaagtgaggagtgtctctgcctggccgcccatcgtctgggatgtgaggagcccctctgcctggctgcccagtctggaaagtgaggagcgtctccgcccggccgccatcccatctaggaagtgaggagcgcctcttcccagccgccatcacatctaggaagtgaggagcgtctctgcccggccgcccatcgtctgagatgtggggagcgcctctgccccgccgccccatctgggatgtgaggagcgcctctgcccggccgagaccccgtctgggaggtgaggagcgtctctgcccggccgccccgtctgagaagtgaggagaccctctgcctggcaaccaccccgtctgagaagtgaggagcccctctgcccggcagctgccccgtctgagaagtgaggagcctctccgcccggcagccaccccatctgggaagtgaggagcgtctccgcccggcagccaccccgtccgggagggaggtggggggggtcagccccccgcccggccagccgccccatctgggagggaggtggggggtcagcccccccgcccggccagccgtgccatccgggagggaggtggggggggtcagccccccgcctggccagccgtgccatccgggagggaggtgggggggtcagccccccgcccggccagccgccccgtccgggaggtgaggggcgcctctgcccggccgccctcagcccggccagccaccccgtccgggagggagatgggggggtcagcccccccacccggccagccgccccgtccggtagggaggtaggggggtcagccccccgcctggccagccgccccgtccgggagggaggtgggggggtcagccctccgcccggccagccgccccgtctgggaggtgaggggcgcctctgcccagccgcccctactgggaagtgaggagcccctctgcccggccagccgccccgtccgggaggaggtgggggggtcagccccccgcccagccagccgccctgtccgggagggaggtgggggggggtcggcccccctgcccggccagccgccccgtccgggaggtgaggggcgcctctgcccggccgcccctactgggaagtgaggagcccctctgcccggccagccgccccgtccgggagggaggtgggggggtcggccccccgcccggccagccgccccgtccgggagggaggtgggggggggtcggcccccctgcccggccagccgccccgtccgggaggtgaggggcgcctctgcccggctgcccctactgggaagtgaggagcccctctgcccggccagccgccccgtccgggagggaggtgggggggtcagccccccgcccggccagccgccccgtccgggagggaggttggggggtcagccccccgcccggccagccgccccgtccgggagggaggttggggggtcagccccccgcccagccagccgccccgtccgggagggaggtggggggggtcagtccccctgcccggccagccgccccgtccgggaggtgaggggcgcctctgcccggccgcccctactgggaagtgaggagcccctctgcccggccaccaccccgtctgggaggtgtgcccaacagctcattgagaacgggccaggatgacaatggcggctttgtggaatagaaaggcgggaaaggtggggaaaagattgagaaatcggatggttgccgtgtctgtgtagaaagaagtagacatgggagacttttcattttgttctgcactaagaaaaattcctctgccttgggatcctgttgatctgtgaccttacccccaaccctgtgctctctgaaacatgtgctgtgtccactcagggttaaatggattaagggcagtgcaagatgtgctttgttaaacagatgcttgaaggcagcatgctcgttaagagtcatcaccaatccctaatctcaagtaatcagggacacaaacactgcggaaggccgcagggtcctctgcctaggaaaaccagagacctttgttcacttgtttatctgctgaccttccctccactattgtcctatgaccctgccaaatccccctctgtgagaaacacccaagaattatcaataaaaaaataaattaaaaaaaaaaaaagaatggactttcccaggccagctgtggtggctcacgactgtaatcccagcactgtggcaggccaaggcgggcagatcacctgagatcaggagttcaagaccagcctgaccaacacggagaaaccccgtctctactaaaaataaaaaaaattggctgggcgtggtggtgcatgcctgtagtcccagctacttgggaggctgaggcaggagaattgcttgaacccaggaggcagaggttgttgtgagctgagattgcaccattgcactccagcctgggcaacaagagggaaactccatcaaaaaaaaaaaaaaaaaaaaggactttctcaaagaaaatgtatttaaatgtctgcaccaataattccagcatgtgtatgaataaatatgatatgtcctttacagtgaaaaaaaaaaaaaagaatggctattgttagtcaaaaaacaacagatgctggtgaggctacagagaaaaatgaacactttatacaccgttggtggaatgtaaattagttcagccacaagaaagcaatttggagattcctcaaagaatttaaaacagttaccattcagcacagcaatcccatcactgggtgtgtatgacccaaaggaaaataatacatcctaccaaaaggacacatacacacgtatgtttgtcacagcactgttcacaatagcaaagacatggaatcaacctaggtgcccatcagtggtggattggataaagaaaatgtggtacatacacacaatggaatactacacagccatgaaaagaaaaatcatgttccttgcagcaacatggatgcagctggaggccattatcccaagtgaattaatgcaagaacagaaaaccaaataccgcatgttctcacttacaaatggaaccgtaagcattgtgtacagatggacataaagacaggaacaacagacactggggcctacttggggggaggcagggaggggccaaaggctgaaaaactaccaatcaggtattatgctcactacctggattttgctctaacacagcctctcctgagaggaagcacagattcacacagagggggtgtggatacagaggggctgagcccagccacagatgcgaggggccatgcctgccgccctggtgtctggccacctgcacaccttccctgcatccagtgatgcatttgaaacttcccgccaaacttggaacctttctcacctgcagtgcaatggattcccctttggttcatccttacccacctcacagatcaagagacttgagtctcaaatttggagtgactcgctgacagtcacagagaatgcacagctgagttgggatttgagcacagtctgtgggttccaaagtttgtcccctctgcaaccgcaaaatgacccagtggcatccacagggctagtgttccttgggcgtgagctgttgcccctgggacaaggttagccacttcctgtgtgtgacccccagtcaagcccccttcccagagggcactgggcagaacatcagatcctcatcttggcttcagggatggagccccaggctgtgagcgtgggggctgtgtgaggacatgttggtgccagtagggtcggcattaccacacctcaccccacatcagctgccacacttgtgccatggcgtggattttggtggctctgtgactgtcactgcccagccctgtgtttctccaggggcccagggctaaggtctgttctgacctctgatgcctgcatgggctggtggggcaggaggggagcttgctgtggattgcagacacgaagtacagagctacatggccaggggaggggacccagaggtagacctatttgaggacagggagcagagaacaccatgtgaccaagttgtctagctgcacacgctggaagggctgacctgttcctctggccccttcgtgggctccctgaattctgctgtcccgtctccagccctgccagaccccacctcaccccgactccaggtttcccactgagaactgccactccttagtgagacctggaactgtggtgggcttgttgtgcgtggggagggaagacagtaaggcaggtcctgtcccagactggtggagttcaccaccttgtggaaggccaagcagtggacgagttacgcaggtgacacattcctctcagtgcacggaggccacataacccagctgcaggtgagatggggaaggggaaggcttccccaaggaggacagggcaggctgtggcaggggtgtggagtgtggagccaggcccctagttatgtcccttacaaggtgtgtagcctggagcaagtgactgtcggttctgtgaggctgaggttgttcacctcatgcagtcgctgtgaggataatctgggagaatacattttgaggggatcacgtgctctgtgcactggaactgctcattcaaaaagcaaccatgggccaggcgcggtggctcacaccagtaatcccagcactttgggaggttgcgccatgtggatcacctgaggtcaggagtttgagaccagcctagccaacatggcgaaaccccgtctctactaaaaataccaaaattagccaggcgtggtggtaggtacttgaaatcccagctacttgggagactgaggcaagagaatcacttgaacccaggaggcgaaggttgcagtgagccaagatcaggccattgcgttccagcctgggtgatgaataaaactccgtctgaaaaaaaaaaaaaaaaaaaagcaaccatattgaaaccacacagtggggacagggggttccaggcagaggcaacagcacttacaggtgctgctaggagcagggaaggctgtgaggggctctgtgctgaaggctgggctaaatcccttcctctggggctcccagcctgtgggagtgtggggttcactctacatacagaagcaggagggaccccaccccagatctcctttgaaggtggagacacttccacacgctcaccaagagggcacagaaagaccttccacgcacacagcaagagggctgtgaaagacctctacaaggaaaactgcaaaacactgctgaaagaaatcacagatgacaccagcaaagggagacacatcccatgctcatggatgggtagaatcaatttttttttagttattcccaaatttttatgagggattcacacatattatgaacacttaataaaacccacctgttgctgttatttccaaatatttatgagggattcatacatatgaacatttaataaaacccacctgctgttcacacattgggcttcgtggggagagcaggggcaggctcccaagctggactgaaaatggcttgagatgttgatcaggagaggagactggcctggggttctgttgtgacgactccaggctgacgcgaggagctccctgtccaggcttgggggtaggtgcagggagcatctgtgtctccctaaggggacagggagcctgcctcagcgactgggggctgctcatttgcccggcagaggaggaggaggagcaccaagggcacaacactgttcctccacgtgagggttgctaaggactgagttgggaagagcaaggattcatgggtggctggagatggcaccaggagggaccaggtgatggctccatgtgtgaggctgggaggccgatgtcctgctggggggaggggcagccactggaagaggggtcagagcagggctgtggggagagccccttgttgctcctggatgatggtgatggcagcaggggtcctatgaaaggctgtttctggcaataatgggaaccagagatgacaaggacctggaagggggacagaggaacagtgcattggcatgagattagaactggagggagaggccctgtagtgatcataatggctgtcatctcacagggctcttgtggggcctcagtgacttggggtttgccaagtacagaaccatgcccaggactgaaaggtccaccaccctggctggatgggtgccatcctaggacaggctgtatttgcttcctggggctgctgtgacagggtccacatgctgggtgcttaaaataacactgattgattctctcgggactggaggccagaagtctgagattccacggtcagcagggccccactccctctgaaagtccaggggaggatccttccctgcctcctccagcttctggtggctgccccaggcctcctgggctggtggccacttcactcccatctctgtctctgtcttcacatggcttctttcctgtgcctgtgtctcttgccttctcttctcgtataggacacttgtcactggatctggggcccaccctaatccaggatgatctcatttccagatccttgtattcatatgtctgcaaagaatcttttatccaaataaggtcacatgtgcagggggcatacccttcgggtgagggggggcaccattcagcttactacatagggtgagggacagggctgcctgccagggcaggtacttcatagaaaccagctctgagttaggaccccgcccccatgtgagggtgataccggccttggggtcagccagggcccccatgtgggttcagagttctgtggagcctttcacctggagagtttacattgtgttggcctagaaggtggcagttgaagtcacagaaatggaaaaggttgtgcagggactgggaggtgtaaggagagaaagggatagaaaagaaggtcctatgtgggggaatctgcatttgaggggtcagaagaggaagagggtcccacagagacatggagaaagagcaggtggggaggtcagagcagctccagcagggctgtgtccacaaagaaagttctagaaggccgtacttaacagcacagagaaaggacatcataagacacctacatatgtccccagctctgccacaaggaggtcagaggatgctataaagggccattttcaggtgcccccaagttgaggttgcccttggtggctctggccaggggcatggtgggagctgtgagctcggagccctgtgtcactgctgggaggctgggaaaggctgacaaactggacccttcctctgccctgcttttttcttagacgcatcatttgtccgtcccttcactctggctcatgggaacctcatcagatacaaatgtggcaggggtggggtgtgggtggacaggacccccatctggaagaaatcagaaatggtcaagctgatgcctgggggttggaagccagtgcacactagggtcaggccagacatggggtgagcgtgagccccatgctcacggggaggaaggacgtgccagggagcgccggcgtgacatggagtcatggtagccttgaaagcagaggcagcgctgtcgccggtaggagcaggggtcccaggagcccgcctggatggcagcttcaagtcaatgctccgctgagaccttagctcagctctgccgggctgggagttgagggatggagtcacactgtttttgctccaggaactgctcaagatgtcacttattttaggtgctagaactagatggggtggccctggctgcaggtctcctggtttgcatttcatctgtgtgtcttgggttggaagggtgctttttcttttgtcccgactgcaccatgtgccctcacaagggagaagcaggacgctccggttttgcttcccggggttgaagccaaggtccagggacctgcaaaggcagggacagaaccacaggggagagggtgggccagtgtcacaggggtgaagggccaccctaatgagatgctgcacaagatggggggtccagggagacttttttttgatgggcatgatctgggtgctgggaacgggctgaagtctgtgtgtccctcctggtgtacacagacggcctcctaccaccagcaggatggagggtcgccttagagaggtggccccagaaagacccagggaccccaggcccaaaggaagaaaggaggtgacactctggaaaccacttcagtcaaaggccacacacggaatgggagacttacgcccagcctgccctcctgccttttcccgaacttaatacacgtgtgcatcacgcacacacatgcagatgcgcacacatatgcacgtgtacacacacgtgcatgcacatacgcagacacccggaggacatagggtcctctgcagggaaggcctgaaggtgtgcacatttggaggttgtaatgatctcacaggaaggctgtacctcacatagaaaagcccctcttaaatattggcagcccaccatgtgtcagggacacacctgaaacgttcatggcgccaagaccacagggagggaaggagagatgcttgcagagcagaaggaccaggaagtggggaccaccacggggacctgcagcctgggacccccgaggagggtggcagaaaccttggccgggcgagagatccggcagcccctgcccgcccgtgcccacgttgcctccaggctccccttgctggctgggcccccaaggtgtgagtgcatggccacgggctggaactttctacccaggttctctgcctcctgcatgtttgcagggacccttgctaatgccaagcccctctgtggagagagaggggtatcaggccccactctgcagatgcagacactgagggccaaggcgactgaatgaaacatccagaaccatagccccctgccctcctgccccctccctctcccccgccaggcccacccctaaatgacaagtcccagtgctgcctagcaggctggcccgagcctgcgctgggaaatgcagcaggctggggcaagtatttttgggtgagagatggctttgaaaacagtttgaaaaacaaaagaaaaagcgtagaaataaactttatgccagcctgcctggtcctaaggcctcagaagctgtgggtgctgcctcctggtggtaaggcctacaaactgcacctctgggacccttcccccaggcttgattttcagacaaggctagagaatgagcttttttttttttttttttttttttgacaaaagcttgtgactaggcccctttgttcccaggaaacagcagacagtgagccgcagggcagggcctctccatgccgtgaattcccgcttgtcctttctcacataatctcaagtgaggcttatttacagctccttgtctgccttccaccggggtggcactggagtgcctccctggctattctcaccccacatctcttggagatcgttccctcttaggacacatggccttgcctcattggctggagtgactgcgtggtattccgtctcatgagtgtgtcatgatgcatttaacccttcatcccctgtggatggaaggttaggctggatcccgtcttttgcaacctgaacaatgttggagagataccatttgtgtgctgggggagacgcagccctagaagtgaagctgatgcagcaaggggagccagggaggcacattgtaaatggtggcgggtggttccaaatggctctcgagagtacactccaccacgaatatgtgaggtgcctgtgctccccccgcccccgacgtgacaggtagaaactgatatttttcctagttctaatttgcattgattttcttaggctagggattttgaatgacgtgtgtatcctaagggccaggcaggagctatgtttcatttcccacagaaagcctcagatcactggcctgggcagagaggaatgagaagctggggcaccttcttcatgtcctcaagagcagcaagtctctgttctggtcattcaaactcagtgccctaaaaatgaccattatgtgaccttgcatggctctgtggggtggcggggctcagctgggtgggtcttctgctgctcttgcttggggtctcttgagaagatggtcctggggatgaagccattggaggcttggctctgatgctgtgatggtcaggcctcgcttctcctccaggtgatctcagggcctgtccctctccatggggcctctccacctggacgacttgagtggtgctcaaagctcccaagggagcaaacaccgaggctgtcaggccttcttgaggcggaggcccagagtggcacagcctcacccccacggcactctcctggaatgagtcccagatagtccacaagggtgtgatgttgggtgaccgtgctctgggcgtggtggatcagctgctggacggtgagaggcactccctgcagggtaggtggacggctgcccccagggccttacacagcaaggccaggggacggccaccctggccggtgagcccgacttccaggcaaggcgccttccttgcatcccagcttgtttggagcctccaggacatccctactgagggtcccacaggagcctgggtctggacagggaccctctcacctcaagtcagacacctttcatccccaacagcagagggactgatacctccccctggctaccctctgtcgcccgaagccagccctgactttgtgcaggcgccactcaccttcctgagggtccacctgcctcccagctggctgtgctcccagccaccctccctgcacatgaatgggccaacgaagtccagatagcaatgtctgcccatcacatatcccccagcctgaccccatatccagcatcccagcacccaccctgttctgctggcacccacctgcctcagccctgcttcgtggtgtcagaggcaggcctatcctcctggcacctcgacccaggaagctgctgggcagcgcctccagccagggccctcctcccctgggctgaggctgtgtggtggggtcactggatgggagggagggaggccttggggcccggagtaccctgccactacccagcaattccagctgatgcctccacatctttggagttgggtctgattggtgatgggttgggggcttctcagtgttctacagtccaatactgcccagctccggaggctcctattgtaccaggagcaggtgttgcataagtgctttctgaagatcatgagacacctggtgagtgaacgaaaccctgggtcccatgggccaggggagactcgagcccctcctggggctggcaagaggccgcgtcccagccatggcctgacctgggatggggattctccatgagttggaagttgggtttccttttcttgccccagaggatccagagacgctgggaccagggctgagctctggctaagcagggctaagggagtgtgtccaccgggcgtcgtgcacggacgtgttgggagacccctggccaccacccagggttctgctccttgaggaagggtctgcagaggggcctgaaaagggggattgcagggcagctcaggaggccctgagtacctctgcctctccctgcagggcaaggaaggactgtgcattgagtgtttcatgctgcggtggctcctccagtgtttcattgatggggtaaggaggcacagggagaccccagcccatggacacagtgcccggctgccccagctcaggggtccagctccaccaggaggacgtggctcacccccagcccgtaggaggcacaggcaggtccctgcatgacacacaaaccaggccctgtttgagagggggtatcccatggcagaggccagggcttaggcccagctttatgggcagactggaccaggacccgacttgggagggcccaaggaagcccaaagtcctcaggaagcccctccttccagaagcaacagcgctgctgaggtgggtcccccatgaggagctgcaggaccttgtctgaccctgctttatagggggctctcatcccatggagaggtgttcccagcattccaggagactgaaaccccaggcggccctgctcaggcctctgagcccagcccagaaaggcaggtcctcccacacttcctgtccccacaaaatccttcgggctcaccctgcaactgtgggatatgctcatcttggagggcgagcaggtactgttgggcatggcgcatgcatcattcaaaatacatgggtaagtcctgtgtgcccgagggtgccagggggaatacacaggacagaccccggctggcctgagggaagtgtccttacactgtccctatgactctctgctctgtcttgaagggggttctggtctggtgggctgggcaaggcacgatgacactgagcccaccccccacatgacccagatgaaagtcaggagtgtggtgagcacttccctgcctggccttccccagctgtggcctcctgtgcacagctggaccccagggtggccaagaaggaccacacaccacccagtgggaggtgggcctggtggaaatggggtgcaggcactgatccccccacaagggaatcctcctggcctgatacccgccctgtccctagagtgcctcatgaagctttcctggagcaccatctgggagtttcaggagcgactttttcagagctgggccccggaggacaacgtggtcctcaggaaccttcaaacctccgtgaaggaactcacaaggaaacactgggacctgccacccccaggtgggctccagcaccaagtctcctcccaagtcaccctctggggcagtcagtggtggggagtgccctggccctaccagccctcctacctggccttcctcctgcacctcttcctcctctactctaagaaagtaaaatgggtctgccactcctcagggcaggcactgagcgtgtgtgtgcgggacatgaggtgcagacaggcaggggctgtgggcaggaccccccaacttccctccccctctttccacattgtccccatcaccccctcaaagggccctgaagggcactggggcagtcagatccaggtgtggaagaccccacccctgcctccaagcagcaggatccctcattcttgagtgcccctccaagcctgtcaagacaacaagccaggaggacaagagagaatcagtgtcccagatccagagaggatttgggcagagggcacggggggaagccctgacccagagccagaaccaagagttcagccgggcatgggatttgtccagccctggcatggggtggacggcctggagggcagagggaaacccgtgcccttcacttctcacccactgtggagacagaccccatgcgaggtggcaagggggctgggtgacagtgaaggtccctttcacctgagttctgagtcagggctgctgaacagccctgaggtgagggagggcgtgaggcaggaagccctgagccagcctgaagcctgggagccgtttcaggaccgacctgaggttccctgaaagctcccccaccccaggctgcacacagccctcaccctgggatcagcagcttgcagaggtgtcctcagtgtcaggccagaggacacccggggaccccaggactccagaggcccagggctgtgggcccagccctggagaggcccctgaggcctctgaccccacctgtgggtcagagcctgtcccccagggcctgagtcccaggcccagagggacctggcttcaactcgagttgtcctaggaggacaggggcactgcagatctccaggtgaccacgcagggcaccagggcactgcaagccctgatgctgtaaggattcacatcagagaacctgggcaagccaggccagagacgctgagcccgtgcagtgatgaggatgtggagggctggctcaagggggtcaacagctgtgaacactgctgcctcttcccggcctcattgttgcagtgcaggcagtctgcaccccggagcctggcccaacagcgccccgagtgccctagtccactatgccaacatggtacccggaggcttcgaggccctgcctgctgcaccacccgcctcctggaggccttgttctgcagcctagcccctgccgcagccacagcaggcaccactgccaagtgccttccagccgggcttcccagaggacagaggcatcctgcagtcattgcctcagcagctcacactgtgaagatagtttcatccacattcccatgttcccaccaaagagaatccctgcagagggtgctcttgatcctgcggtggggaaaacagcacactaggtggactcagctcctttccctggccaccatgattgctggatgggcccacaaagcagccatcagacaggcatgttggggaagagcctaagcaatcctgcttgttccctgaccagaccgacaccactgccgagtgccccatctgctgatgagagatttggtgtcgatccctggactggcaccatttcccaggaggagcggctggctacctgtgggcaggctgcccacactgtggagagggctgagatcggccttcactacggggagcccctacctggacatagactcgccagccctgcctgttgccatcacagcagcccacatggcattgcttgtgaccagggtaccccattcacagtgacggacatgcagcagtggcccttgactagggaactaactcttctcgctacgtcacccaccgcctggaagcaactggacttaggatcgctgttatgctgaagtggtgaggttgtcttacaagatgaattttatcctttctactggaagccagtgtatggtgatgactcccccacaaccagaaggtgtagttctgagtgaaggtgtgaaagtggacgatgttcagtgttgcaccgaatgtctcagtcacaaagttttcctattgcctgtcctggagaaatggaactttgctggttggaaggtcttaggacccaggaagagtgaagcttcccccaggggaacacaacaatggttctatttaatatgaggagacaggactaagtctgaaacctcggggcattctctggtgttcttgagtgtttccatgtaaaggaagtcaagtaacttgccacaaagctttgccacagaagcatctgaaaaaggagggggcagaactattcagaactcagaggtttcagaaccaaagatgaggccgagaagattcctgacccgctgagggcaagggaagtatgtgggggcggctgggagaggatgttatagagtccgccatggcctcgtgacctgtcacagaaccgtgcactttaatagctgtgcacatcttctctgcactgattatagtatttctttgcctttgctactctccacacagggagcttgctacaaaatgcacataaccacagcccgggtcttgcaatccaagcctggcaaggattcagcatgtcaagggcttcaggtctgaaggtccatggctgtcctgaatcctggatatcaccttcttgcccaaaaaaggagggacgaggctcaaaccgcagcaggccactcacagaaagggacgaaacgttgagtgcgtggcctccctgacacccagacaagactttgggcccaaagccaggctgcagctctggccactgactcagaccagggacgcccccatgcaggccggtgtcccctggccgctcttctccctcctgccaccctctcttcggctgcttgtgtcaataaaaggaaaactggccagttctcagagaaaatgtagctttattatgacataggagagactacaaagcactgggggggaggaggagtgacacagctcctcaaaatggaaggggaaaggaagagtaaacatcttggtaaataaagtctccaaccacagcacagtcattggaatttttttcttcatttttattttcaaacttacagtaaacaaaacaatcacttaaattgtcaaaagaacagcaattttacacaatgaagagcatacacaccaagccaaaatacaatagcactcaggtctatatgttgcagtggtgctggcgctggagggaatgcccagggaggctgcagtgctcaccacgaagcccaggtccacggagggagccaaggtccacagagggccccggggccagagggaggccgcccacactcccagcacatcacctgcctcaaagcactcccttcaggcatctgaagagggaaaggccatgtgtcttcctgggaggcactgaaaggccagccagcatctccaaaatgcaggccattttaacactgctgtgaatgtgctggggtcaccaagggggccccttagtggtcagatgcactttgtcacaatgtacacctacatggggtgattactaggcaacgggaggtttcctgaatttcacagccagatggggagctaaaagaaattcctgaacccaacgcgtaaatattttgttctgacaaagtaaattcacaagaacacatcaaacacaagacctaatgcaaggggcagtgccagggccgccgccgcctcctgtgagcagctcttcagcagcaggcatcaggtaactgcttagaacggcaatgccacagtggaataagggggactaacttggatacgaaagtttagaataatgcccaccaaaaatccatgtgactccatctctcttcccagttctaatgttctcagaacagcagccacccctgaatgcaagtggagacaggaaggggactaggggttggccggcgggaggggaggcagggtctggccaaacccaggcagctgccagaaagccttctgcactccgcaagacaccccagtaaactggggcgtcccaaggtggcaagccttcatgaaggcactgcccagctcacaatcctgtgggccaacttcagtcaactctcctttccattagatttgttcctaattaaaagaccactcataggccaggtgcggtggctcacgcctataatcccagcactttgggacgctgaggtgggtggatcgcctgaggtcaggagtttgagacatggtgaaaccccatctctactaaaaatacaaaaattagcctggcgtggtggtgcatgcctgtagtcccagctacttgggaggctgcggcacgagaactgcttgaacccaggaggtggaggttgcagtgagccgagactgtgccactcactccagcctgggcaacaaactccatctcaaaaaaaaaaaaaaaaagactgcacatcctcaaaggagatcttcaaagcactgtcacccaaacagcagaacttggtcacatgggaccatttctgaaaatctcggcccatctctgtttctctggtaattcattttataaaacatgcttccatgtgaattctttaagtgcagaaaaacaacagaaaatgaacagagcacgtgggcaagaaaccgcatccctcaggcttctgccacacatgatggttctgcgggctgtgattgccaagtcctgtgttttccacactgagcagtgagtagcagctgccactgtcactaccccctccccagcccagccagctaaggagctgggtctggtccccaccagcttctccatggcctgtgagctaagaataggtttcacgtttttaaatagttaaaaaaaaaatctaagtttcttgacacagaacaatatatgtcattcagatttctgtgtctaaaagttgtactagacacagccacatctctgtactatttatggcagagaccatacagcccacagagccaacagtgtttactccctggctgtctatgaaaacatctgcccaccgctgagacagatgatcctgttcctgcaggactgaagaagcctcagttcagatgctgctggggctcctgggacaagcacagcccgagacacacttgcttcataaactgtatttcagtacttttcctcccccttgtccctagtttctaatttctcagtggacaaatggacaaaccatctctgtttgaatttgaatacacagatacatgcaagatatcttacaagaaacaatgcacatccttctactttctctttcagctctgctgacaagctcaatcacggtgtcattttactgccaccacgcccgaaagtacaccaaatgtaaagcagaggcagacgagacaagatgcaggctccaccagaggccactccagcttcgcgaccaacacccttggctgccaggcagcggtagccaggcaatgggatagaaggcaaagaaaatacgagggacagaacccatcagacaccggcagacactgcatttactccagactgagatgacagacacaccgtatgagctgcagcacaactctcctccgctgcgcccactgccagccaccagcagacaccaaggcacccagaggagccaggcacacagggcgggcagcaacataaacggcacccattaaaaagcaagactcgctcttgagactaaaggagaagttacctaaatttctgtataaactcagtaattcattcactttactagtattacatttatgaaattcacctttgtggaaaaaggagcgggagagggataagaaaatgcctgtttctagaaaaccgcgagatgcttccacgtgcagcttgatgctgttacctgcagaacagacacgcttgaaaacgcgacgtagtgtccgtacttccgaagctaggaggctgcttcacagccgctgagaaaatggaggtgaagagttccatactctccgtattttaacactaaaacaccaacagaaaggcatctgcaaggccctctgtcccgcacactacacctctgtgtccagcttactgctttcatggacccataatcttacagcaggtaggggcctttccacaccgagtgctggggaacgccaggcagcggtcactctgtgctgtgaggcccccgttgcacccccatgtcatgacacaagagatgttctggtgacgggtgtacgctgctcctcccacccagagcacacccctcatctcatccatcttcaaagcagctccaggagcctccccgtccgtgtggtccatcccgacccgatgggtcccaggtgcagaggggccacatctgcatgggaggtggtgtcaccaggccggggaggcggcgggagacttgggggaggggggggccagggaggatcactttgtgaggcttgccaatgcattgcctttgtttttctgaccagctgcagataaggctactcgtattccaggaactgtttgtgatagaacagcaagtacctgtggaggcagagagagggaggaggctcacctctaactcctaagacaggagccagaacaacccaccctacacaaaagcctacgtgctctgcgctctgcacaggtcggccaggcccgagttgatggttttggctttttagtccgcaaggaggaaagagtgcttcactggctggtggcactggccctgcccatctctgcagcccgaccaccacccccacctgccacgaggtcacccattgcctcacccaacctcccacagcctctcccccacttgtgacagccccacccttgtgcagagcccactgttttcaagtggctccgtccagatccacctcatcgccctgaaggctgtcctttatcccagattcttccaaataaaacctctcaagagggcttggcttccgtgttgctcagaatgtgaagtgcaaagccctcagggagttcatggcagctggggtccccctgacccctggagggtcaacaggtttctctatgccatgaaggaatgaaactggaaaggagaggagctgataaagaactgatgtgggccgggcccggtggctcatgcctgtaattctaacactttgggaggccaaggcaggaggattgcctgaagtcaggagtttgaaaccagcctggtcaacatggtgaaaccccatctctactaaaatacaaaagtaggcaggcgtgatggtgcatgcctataatcccagctacttgggaggctgaggcaggagactgacttgaacctgggaggcagagggtgcagtgagctgagatcatgccattgcactccagcctgggcaacaagagcgaaactccgtctcaaaaaaaaaaaaaaaaaaaaaaagaactgatgtgttcagttcacgcagttaaaaaacaactgctctgacgttctctgtgctaagggaatgcctccagagagggcctttgctcaggcacctcttctcccacctgagcacccatcgaggctggcatcctatccagaacaggcttcattacttcggcaaatgaaggtcaacaccttcgagtggttctaggctcagacatgggctagtctcagctataccggaggggaagcaccgtagccaccgtagggccttcctcccaccccacaggacgcacccttcgctgtccaggacgtccttgatgctggccttggtgatgatggcatcgtcacacttgaaccactggtctttgtgctgccggataaagctggtgtagtggccactctccaaggtcccttgatggttaacaacagcaaacagggaatacctagtgcaggagcaaaggagagggagggcgcaggtgacttgatgccgtcacttgaggtcatcaccatcagaaaccaggcagcccaggcagggagcgggaggcctgtgggcctgtcaacccccagggcctcaggctgatgcacaggaggctgcaggaactaagggagcctggtcaccccccttggctctagcccgggtccaggcgcttcctggaactccatctagtgggagtggtgactgcagtcagcagtggggatcctggaacaccccagcctttcatactttctacaaccccaaggcaagaagaatgaacaccgagctttccagatggaacctccctcctgccagaggccaagagtggggctgggctcctccaacaggagggagcatttgtggcaccacgtggagcggcctttcctagtggagctgcgggcagccaatagtggagctgcgggcagccaagcgggaagcaggtcagtggcgggggatccgctgggcgccctacaaggcagacaggagcccacccccagctcttggccagaggccctggacacccacaccgctaagcaccacttacttgttgtcattgttgagactgtccgtgggctgctggtactgtccattcatcctgctctctttgctgtaacagacaacggcaggattcagcatcattaaaatcatcaggcccagagacacaaggctctcgtgaaaccaacacttatccaagcttgaccatgcagatgctgcaccgaggtgcactttatgcttcaggcagaaatctccccatgtttcgtgaggacactgacgctcaagctgtggaggcccctgcctcagagcacacctgggtcctgaggccacctggcgtggcccctggttcttccaaggtgggtcctgaatagggctggtaatgggagctggatctggaggaatgtgagtttggtttgtgacaaagcagatggtgaaggtgctcttcctcccacatgtaaagggttagcttgaaagggtacgctgaatccattctacaacctaggcaggtgcctcctcaaaagggacaaagattgctgctcattatttcatgaccagcacctcccctggtgagatgggggagaggagtgctgggaacaggaagccatgcacattatttactgcattttcctacagctgtgtttggcaggaaacaccaagatctttgagaccctgaccttagaacagtactgtcacctccctcagtacgtgaccatcgtggtcagactgatgatatggagctctgactctggtcttgttttattcaggaggtcatctgtgtgccacaggggtgggacagccatgagaggacaccaggaagaggccgctaactaccaaaaagcaacatgctttccacggtgctggggctgggactgtggccaccaaaaaataacaccctgcaaataacaacatccacgtctcaaccctcagaacctgagactgggacctcatttgtaaaaccagtctttgcagagactcaaagtaaagatgttgagatgagatcctcctggatgatctgcctaggtcctaaagccaatgaccacggtcatgacagagaagcagagggaactggacacagagtcaggggagctggccatgtgacccggaagccaggggagtgacagccacagaaggaacacgtggaaccaccagcagctggaggcggtgaggaatggaatccccaagacccttgtaggacatggagccctgccaacaccttgatttcagatttccaacctctagaactgtgaggaaattaattttaagccgccaggtttttggtcatttgtcacagaaccacaggaaactcctatgtgtctcatgcattagtaagcagctgaattccaagtaccccagaataggcagatttgaaaaggaaaatgcaatctacaactgcaaaaccaactatgtctgcctgtacttcaacatctgttccacgaactaaaatgttgccttctcgctgtgatcccaccttgaggactttgccggtttgaaagtggattgataattgttgagaaattcaaaacaaaaacagggtatctgatgaaaaacaactcattaacatgtgctgtatcttaagatcaggataaacagatttggggaaggtggggtttatattagtatcgacagtcatttttttttttttttttagacgtagtctcgttctgtcaccaggctggagtgcagtggcgcgatcttggctcactgcaacctccacctcctgggttcaagcgattctcctgcctcagcctcccaaatagctgggactacaggtgcctgccaccacacccagctaatttttgtatttttagtagagacggggtttcaccatgttggccatgatggtctcaatctgttgacctcatgatctgcccgcttcgacctcctgaagtgctgggattacaggcgggagccactgcacccggccaacagtcatcttaataggagctccgagctggattcctgtcctgataggatcacagcccctcaggacacagaacgggcctacaaccccacatacctggaggccatgaaaggggtcatgtccagctccagggggaaggacacatacgtggtgatcttccgccgcagcttggctgagtgttcaaatcgctgcagaaataggaaggggacagagggaagaggaaagaagatcagaaatgtcactggaagcttcagggccttcttctgatgacaggtgtctgtgttatctcttttgtattttattgaactgccttgtagctacatctagaattacagattcaaaaacacagtggcaatccacccaagtcctcatttacagggttcaagtcttcaaatgatgggactgttcagtggtaacaccaagggtacaaaaagtaatcttacagcaaacccagcaaagcacagaaaacaaaacaaagatccgtggcccatggcagcaaaaatgaacaaattgttcctttcaccagacagaagacagtcctttgcctagatcaggagtcacccattccagccagcaagctaggaatgggcgttttccatgtttaaagggtggtgaaatgaaacaaagaacatgtaacagagaatcgtatgatcgcacgcagcctgtggagctcgacatcttcagttatctgggcctttagagaaagagcttgccaactcctggaccagatctgcatgctgagggcctttgtcttaaaataaaacagaaaacctgaggagggggtagctggaggaatggtagaagtaataaaaacttcacaaccactctgctcccaagaaaactcacattctactttcactgcgaagccactgattttgtttaccgcagcacagacaaaaggacaattcacagatgggaggacaattccctcacaccctcccttcctcggtgttcttcctgcttgctgcaattataaaaaatgtaactgcacagcaaaccaaaaggctgaggaccgtactgtggactaaaaactaagtctgccattagagttggctttctggaaaacttactttgagatgaaaacaggctacgatgggcagtttcttcatagtgagctgctttgtggactcctggtagctatggcaaccgctgcacttgatcttggcgctgctgcccaagtgctctggtctggtgaatctacaggcgttcaaaaaagacaggagcggtaagggagatgcaagagacagaaaaatgagaggaaagaggtattttatctctttcattgggttgatttccctaccaaaaacatacacttacaactaaaaatgaaacaatgaaaaaaagagaaaatgttgtccacctttgctgcctgtctctacagaatatttatcttaaatattttttttccaggaaaggcctggggaaatggtaataattttctaagtaccatatgacccagcagttgaatttgagccagagaaatgaaaactaatgttcacacacaaactgtccacaaatgtgcaccagaatgttactcacgagagtcacaaaactggaaacaccccgtttcttcccatggctgaataattaaagaaactgtggaacactgtaccatggagtatgagacagcagcaaaaaaggaaggaactactgatcccaagctgtaccctggatgcgtccccagagaattaggatgtgcaagaaaagccaatctcaaagggttccgttatatcattcagttgacatgacattctggaattgtcaggcgtatggaaatgcaggagtccagggtgactgcggttacagagtgggtggtgagggaggaggcactggagatgctgggtactttccgcatgaatgtctgaatcctggccagggcgtcgcaccacagtgctgaggaggtcaccatcgggggaccggggtaaagggtacctaaaggcttcttacaactgcatgtgaatctacaatgatctcaacataagcagtttaatgtagagaggtgagaggtcggccaggtgcggcagctcacacctgtaatcccaccactttgggaggctgaggcaggtggatcacctgaggttggaagttcaagaccaacctgaccaacataagagaaattccgtctgtactaaaaatacaaaattagccgggcgaggtggtgcatgcctataatcccagctactcaggaggctgaggcaggagaaccgcttgaacctgggagatggaggttgcagtgagccgagattgtgccactgcactccagcctgggcaacaagagcaagactccatttcaaaaaaaaaaaaaaaaaaaaaaaaaggcaagaggactgggaaaggtaatttcctgaccgtgcagaggcaggaggtaggagggctgcatcagaagcgtgtctggcacaggtgtcagctgccactgacaaaacctgcagaacagatgattcaacaaagcacacgccaaattttgaagctgaaacaccagcaaaaaattcactcttttcacaagcaggtatggaaagcccttatttatgctctggaaattctgccatcttaactagggcaagacgagggggcctctgggcaaagctgcacctgtttcgttgctagctttgtgatctgctctccaaaggactcgaaaaggagcctttgcttgcaatacaaagtggggacccgggtgcactctacctctcctccaccttcccgggagtcagcaccacatcatgtctctcctaacaacacaggcttcccacacattgtagtttgtgaagtgtggtttctacctcatggcctgctgttttggcaaagctttcattttattggaatttatgattaaatttaatttagctgcaaagactttctttaaaaaggttttggttggccgggcatgctggctcacacctgtaatcccagcactttgggaggccaaggcaggcggatcacctaaggtcaggagtttgggactaccctggccaatgtggcgaaacctagtctctactaaaaatacaaaagttagccggatatggtagcaagcacctgtaatcccagccactcgggaggttgaggccggagaatcacgtgaacctgggaggtggaggttgcagtgagccaagatcgcgccactgcactccagcctgcactctagaaagagcgagactccgtctcaaaaaaaaaaaattaaaaaaaaaaaaatcacaaaatcagctgggcatggtggcacacacctatagtcccaactactcaggaggccgagacaggagaccaaggctgagccctggacactgaggctgagcccaggagatcgaggttgcagtgagctatgatggcaccactgcactccagcctgcatgaaagagcaagaccctatctcaaaaaacaaaataaacatgcaactttggtcgtgctgactatgcagccagacagaaaccaaaggctcgtacctcttctaagggatacttccactcaacaaggactcttctgcattacctttaattgatgcaaataaaacaaaggctataaaataatagacaaattttaggaaggttttctgctgtctttacaattgtatgctacagctacttaaatacatttttttttaaaaatcactcacaggtgtggtggctcatgcctgtgagcactttgggaggccgaggtgggtgaatcacctgatatcacgagttcgagactagcctggccaacatggtaaaacccccgctctactaaaaatacaaaaattagccaggcgtggtggtgcacacctgtagtcccagctactcaggagaatcacttgaacctgaaaggcagaggctgcagtgagcagaaatcgcaccactgcattccagcctggtcgacagagcacaactctgtctcaaaaaaaaaaaaaaaaatcactttgtaaatattattacttatcccaaatgaagcagtacatgcacaatttcaaaaacagccctaagagtacagaacatcacaactaagttttaatcatgtgcagagaaggccgtggaccatggggagaggcccgggcgcatctcagctcacactccggggtaggtgattagtgcaagggctaagggagcagccagtttggctctgggttcatttacatgcggaggttggagtagcagctgctgacactgacacctggtgctgtgcgaagctgggggacagaaatattgagtcatctggccaaaacaaaggacaaactagcacaagagactgcagccaatccaggctcatgctgcacctttgcccaggctctgtcctgggcatgtgaaagagccctgctttggtcctgatggagcacagccttctggccaggagacacgcccccgccgtgtgggtgcaggcctctcaccgtcgcaggcagtccgtgagcgtggtggttcccgacacgtggctttccccgtttaccacgttgccctcgctccctgggctcaggggccagaatggggtggaagagccggggagatccaagctgatgtcccagaaggggtcgatggtggtggagactccactggaagcagagggaaaacaatggctgtgaggactgacacccacccagctccagaggcaacccggggtggaagccgttcccacatcccttccccgctgtgccctttgtcacagtgacactcaggtgggatggggcaggagcaagagcagcagtgctcacacccaacgtgtcctggctcccaaggtggccctggggaggggtgtgtgtgaactcggaaggcgaggggcgctcctcaagcaaggacttcccagtctggagaccatcacagtcactgagggacttgggaggaggataaactcatgggccctgtcagaggctctgaatccacaggtctatctcagctgcatctagaacttggggcctgtgaccctaggcaacactggagacccctgcacatttcacagagcgtgcccaggccaggcccggtggcctgcactggacagtcaatgctgcatttcacaaggccagttccttgctagaaatttatttaacaatataaaaaatgaaaacttgcagactgggaaatttactctcgatatttatacaggatttaaatcttgagacaatctcctactaatggaattcagtagttaagggacagcgaggaggtccaaattgctcagagcaaactcggtttctaatactcagagacaaggccccaaacggtctatgctccttatagaaaatggcccccgtgacacaggcagcactggcctttcccgatatttgctcgtcttatgcagtttagaagtgacagtccatttcgggttctgaaataatttcggtggatcatgtccagggtttttaaacttcaactgaagtaaagaacagagccaggcacggtggcccatgcctgtagtcccagctacttgggaggctaaggagggaggatcgcttgagcccatgggttcaaggccagcctgggcaacatacacaagaccccatgcctgaaaaaaacaaaaacaaaaacaaaaaacctgtagcatgcactgaggttgggtgagagggtcccctgacctaacaaagcaatggattctccctgcactcaacacttgaggctctaagcagagaccacatctgagaagaattagggccactacatcagaaaatggaaccagaaaccataaaataatgaaaactaacacacttcgaagcacgtagaaaaacaatccaccatgcatgatccacgccttcttgaagagggctctttcacttggtccctggtcaaggactgtaagatgcaaaatggtaggggaagcttccaagaacacactgctggctgtagacaacagccaagacctcaacacgaagggctcgcatcccgaggggacacctgccctacgacctccccaagaggaagcacccccaccccacaaccttcgctctcatggcgtctattaatcatttatctcatagcctccttaaagacctctcagagcacacacagctctggagactgggaggatgtcagtacggccccagagggtttgatattgccgagcacgcagcctctcacttactggcagacttggcaggtgacgtctgactgcaacccgcctgtgaagatctggtctatgatgcagttgcagtggttggggttgttggccttcttcccattgtcatcacctggagacagaccacggctctgggattagtgtctccccaaatatggggagtctctaagggaagagcagttcaccctgcagaagcctgggggagccagggccaacgctttaaaaggccatgtgaggacactcctcattttagcagagggtgtccttgttattttaatatgacgagaaatcacagcacttggattttcaatgctcctttttctcattccctaacaagagccccacagcttcagtcttgccaagaaaacccacctaatgcccagtgactgagcagaataatcgattcccattatcatataaagaatgactgaatcaatattgttccagtgagacagctgaacatatggtgggccaggtacacccggggaagccccagcaacctccctccctgagtaggtatcatggtgccccaagttcagaaagtgacaccgcaggacacaggctgtcctcatcagctagagcccccaggggacagcgtgtcttccagtcagttgcatctggaagtgccactcccaccctctctattcaatacacacttcattcatatccatgtgtgcagatctgtgaaaaagaaacttaagtagcagaacttaattcgtgtgtggaatacatattctacataacttcactagacagtggggacagggcacgaggacacctgtatatacatcacagttcaaagacgttgaatcatgacagaggaatagagaagggccactaagtcttctgagagcagaaggtttaagattagagagaaaaatgcttcccagagggatctcaaattcatgggacaaaattcagaggacaagaatatccatacaggaaggcgcaaagaatgatgaacagaatggccaggcgcggtggctcacgcctgtaatcccagcactttgggaggccaaggcgggcggatcacgaggttaggagaccgagaccatcctggctaacacggtgaaaccccgtctctactaaaaatacaaaaaattagctgggcatggtggcgggcgcctgtagtcccagctactcaggaggctgaggcagaagaatcacttgaacctgggaggcggaggttgcagtgagctgagatcgcaccactgcactccagcctggcgacagagcgagactctgactcaaaaacaaaacaaaacaaaacaaaagatgaacagaaagatgccgtgaaggccacaaggacaaaatgcacgtaaccaaggccatgtggccaggccacctcgctgaacagctctggcaaccaggtttctaaacagaagaaccttacatttcttttcagacatttccaagggaattctgtcagaagcacgtcagaggtcacattttgtcatgtgaacatttaacagcaatgcatttttgaacaagtgatttttagaacatctttctgctgcttacagaaggctcttcgttattctcactaggtgcttggggtaacagcatagtcacttccacagtggctctttcctctcttataaatcatactaggacatgaaattctacctaagctactaagtaactttcctttgatttctaggtaagaattaaaaggatcacgtagtttttcagaggaaaaaaagtaagtaccaaaagaaaacagaacccaaagtcacatttgaccaaaaccagccattttagctcaactgtgggttgtttctgggctgtgatctcagaacccataggttgtacgtaagcgcctagggcccgggtgcacagccttgagacggatgagaagcgatgggaaggccagcccaccaagctgttcaactcggtgaaccgtcagaacaggactctgttctctaaaagactccaagttaaaattaactgataggatatcggctacaactagctgtgccagcccagagaccacaggaaactcacaagcagccaggtgccctgtgacctgagcgcatgggttctcagagtatggcatctgaaccagcggcatcaacatcagctgggaactgattaagagtgaagaagcccctgccccccacagatctgctgaatcagaaacgccagcacgggctttaggaagacctgcaagtgaccagcccacactcatctgagaatcacctctcagtctctctgcctgtatggatagacttcagctgcaggtccctcacactgggatctccaccatgaggagtggggaggagccgatcttggctcaagtcattcattcccagcctcccacctccagcgctaagagctgcccctgccaactaccaacaccacacaactctgaaaaatcatcagggtaccaccctggggccaggctgtgggactatgttgggggagatggcccaggtccaatgagaccccaagagaagctttgctcgtcctgtgtcccagctctctggctatttcagagcaaccatcagtccttttggagagtccccaatgggaaggagacagttgggtgattaagttgtgtttgggggatgtccagaagcctcaggcctgataacccacagggtcccagaaatgccagggcaggcaggggcctcaaagcacaggcccaagagggctccaagagtttgctgttcactgtgatcggtcactgaggacctgtcatactgctggaactacttcctcgcctcttaaaaataaactaggaggagcctctctgaggtcattagttatggtgacttcagaaacaaatgacgacaagggctatgatgacaaaacaatggaatgtgtcacctgtgcccctttttgcacgagtgcatacactcgctttgcttccttccccttcaaggaaaacatcctgccctggtggagggtgcagagcccagggcccacctttgcagtgtcggtggagcacgtccagggccgcgatgaggaactcgtgggcgtcctgctgctcgtagcctgctaggtgcctcgcgtgggtccacaccaggtgcagcaacttatacgggatgtgaggggaccggtgtccagagtaaaactgccagagggcggggaaggaaaccttgtcaggaataaatgtagactctgaacacagagtacacacaatcaaaacctttatcagatgcctaccattggctgtggctcatttgacacaaatgtttggattttacttttctactttttgcaaagtctatttttatctgggctcactggacttttcgagtcctcatatgaattttttcctttctaccatctagttttccacatataagcctaaaaaatgaattatgacttgctactatgagatcacatgcaaataaaagtgactcgatttgcccaatactagtttcctcaaagcactagccaaaccactcaggcccatggacaccagcacctccgcaaagggaagcacatcactgtgattatgcagaattcaccagcatcagccacaggattctctgcctctgaggctaatggcaattagctgagggcttgccagccagtcctctccaacagctcaactccagccgcagacccagcagcacaccttccatcccacggcttcctccccaggtcagaacccacagaggggtcttgcctgtgcaaatacagaattcagggcagttttatttctcatcaaaaaacccaaaaccacagaccacccaaatgtgtctgaactgggaaacagacaactaaaccataacccatctacataatggaacccaactcagacatcgaaagcacacatcatggatgcacgcaagacacgggtgaatccacccagtattacattaagtagggacagccagattcagaaaggctacttcctgcatgcatccatccgtatgatgcgctggtaaaggacactcaagggaccgaagacagatcggcagctaccagggtctggggactgggggttgacttcggaggggcacgagggagttcggagaggtaacagttcttcatcttgagtagcagcagttacacaactatgcattcgtcgaaactcatctatctataggctagaaggtgggtgtgactgtaatttacaccttaacaagccggagtctaaaaacaatctaacacaagtgagcttatcactaaagtcagtgatacaaccacccaccaacttcccagctgcaccctcctttctcctatttgggccgtgtccccagcagttatggcacattgcaggtactttgaggaaatcggttaggctcgaccagaggctggcaatctgtttttgaaaggcttggacagtaaataatttcagctttgcaggttggatagcctctgtccaactgctcaactctgtggctgtcccacaaaagcgaccagtgaccagacagacatgagtgagctggcgtggctgcatctctcgcagaggttacgaatgggaacaggccagggctgttggctggctcctgtgcaaggcacctgaagaacaggcaccagcctgcttattagttgaggtaactgagctgcttcagctctgagaagcatgtctaggtcacggagccggtgagggctgaggcggcagccgtgaacgccttgctctgaacgctgccatgctctgatgccggggacagaagtggacaggaacgccacacgtgcagcccacaggaacagccaacgtgcagcgcgtagctcatgaggacagaggctctgatggggcatgcttagagagacctggcggtggaggagactcgcataccaggaggacacaggagggtgacacatgcgtgcctttctgagccaggaaggtagaccatggaggaagaggaagggggagaatcacccgtctttagagacaaatgtcacccaccagggaagtctctgccacaagcctctcaaagggcttctccttgttctgagtcagcagtgcgtccccaaaaatcacgccaggtcttccctttttggaaaactgtgttttccataatagacatgtatattaaacattaacttactacaaaaggttctaaatgtatcttcctttatcatggtccaccttaaattttttttttgaaggtgaaaacaaagtaacagaaatgttcccctgcagaagtcaatggcgctcacctcctgaaacagtgaggacatctcacagaccagacaggagctggggctctgcatctcacagcggtgcctgtcagacaggaagaagtcccgcagaagtggcgtgtgggtcagggcctgcacgatgcagttcatgaagcatgtgttcccaaggttgatcagcccacgcagacctggacacaaatcaccagagagcaggagttacctgtgtgctgaaccacaggtgtcgctggatcccagcggcttcctctacctctacatactcattttcttttattcattcattcaagccagaacacgatgagatatcgcattctgctagtttttatgccacttttacatgaacggtattgaagaatgtccaccaccatggacccctcccacttcagccattgtatgctttgacagaattacacaaatatagtttctacgacaacaggccaggtcagagtgaagcctaatgaacaaacaaaacaggtttttaaaaatgttctagggccagggcaggggctcatacttgtaacccagcactctgggaagccaaggcatgaggatcactggagcccaggagttcgagaccagcctgggcaacatggtgagatgtctctacgcaaaacacaaaaattatccaaacatggtggtgtgcacctgcaatcccagctacttgggaggctgaggtggaaggatcgcttgggcccaggagacagagggtgcagtgaactgtgctccagcctgggcaacagagcaagactctgtctcaaaaaagaaaaagaaaaagttttaaagggtattccctcaatttgtagaaaattcagcgaacacttacactcacacacatcatttctctccctgaagattactgtgcccagcctcaccctggccaaaatcaacttgagtccctttacccacacagacgctgaaggctgtgagggcagggctgttgctacgcatcactctgcgccccaagcccactgcaggtccctgcagagaacaggtgctcaagagctggttgctgagcacattgatgagtgacagttatgcagggcttcaacagaatcatgtggacttaagaaacccacaattctgtatttacttttaaaccctggaaagaagcctagctgagagtgacgacacgctccacccacctatggtgcagttcgaggtgatctttctccttttcgggttgtgcttcagcagttcaagctcccgtttggttggttcccaagttgaaaacttctctccaacgcctaagcagatgaaggacagttccaagcgctattagctagattttcacatcaagtgtgtttacacataaaagctgtggcgctatgctgtctgtcagggtgcatttcagtgagcaacatccacagcaccagggctttctcaaactctactgtgctgagaggggctacacacaacacttaaaggagcttctcacagagggtatgaggatgtgagctacgtttcctgcaagaaaagcagcacctccagtcaaaactaccccaacgccaatgccaaaacagttgtttttcaaatgtcttccatccttcagcacagagatggcagcatcagcaccaatgggaacttacatgaaggattctcccgcaaacaagtgaaattgaaggagagagcttgcacttttcagcaaactgaaatagcataaactcagcgtcgagttaccaaactaagatagatccaacagttaaaaacgtgtgtgccacaaaatattcagagagtggtggtaaatgctaattggcatagtattccattcaacgcacaccctatgcgctcagaagtacttgttccatgccaaccaacatttctgaatacttcaaaatactttaaaagacacagcatgttggatagacagaattataaaatgattctagaagaattccattttaatcctggacatacatttcttaggcccgtgctttaagtgctctgcacagaataatacacccacacttagtcacaatgttattaaatttctgagagggaaaagaacagcgaacacaagtcagagattgctctccagagaagacttgttaaacacaaataattctgctcactgaaagagcccctgttgctattcttcccttctcaaaacactggggtgttttcaatggagagtaatcaaggcaagaatgtaaaacaggtgtcaggttcatatgtttcctttgcaaacagtgatggctttgctaccagggagatcagatgctcacctgtcaactggggtaaaccacacctgtcactatgtcactatcactgtcaaccactatgagcatctgtcagaatcaaaaaccaaaaaaaaaaaaaaaaaaaaaaaaaggaaaaaaaactcagggaagccaagaagaaataaaaaataaagaaaatgactgcatgtttgctcctctcactctgtgtagccaataaccagtgtgtgtggccacacggtggcgacggcaagtgcaaaacccacactggtgcgagagccgtgagggcagctcacaagatggcaaggatctgactgtgcagtggggctgctgggagactctcctagtttccttctggtgggtctagtttccatctggtgggtctagtttccatctggtgggtgcacgctgttgacatggatttaacatcacccaaacagtccagagttttaaaagagattctaccacaacttgatccgaaaatagtctgctctcctgggaggaaggaggtatgtttacatataacattactgcaaagagatcgcttgctagaattcggcagagctgagggcaaaccactcagggatgtccagatacggagtcacctgtccccgagaggtgtgacctcgccacactcgttcagccccacatctgcaggtgcgccctgggagagcttaagtaatgctggggttgttcccttggcccagctgcaggcccatgggggacctgcaagggaagcaccctggaagtggtcccaagcacacgggcagctatgcatgcctcgacactagccacctcccctgtcatgcagagcttcagctgactccactgtgggccttaggggaaggtggggacggcctcttcccaccagcctgccacttcccacctaggtacttctctttctcctactgggtctgcccttgatggacatgagggaactgcaggatcaagcaggtaaactgaggtggaaccaaaccttgcattttccaagcttttcgctgctcctccttggcgattatttccatgtctttgtcatagatgtagtcctggcacagaaaacagtagatgcctccgtacatcagatcaatggctgaggagagaaaggagggaggagaaaccaagttgaattaaaaaccacaatggaaggctggagggcagagttaaacacagtgaggttctgtagatactgactgttcacagcaccttcctattcacaagcagggaagccagtccagcggagtctcctatcctgagcaggtgaggggcatgcactgtgtttggcagctcatgcccagggctgaggtgtcttaaaaaacagaggcgacccatacatacttttcaaagcagccaatactccaggatcaggacctctgccaccttctctgaatgcgtggtatttaaaactggtacaactgcattggatattttcagtcctggccacctgacacggagtgactatgcttccctccatctagaattcctgacaccatcaccataaagaatgtggcagcaacttgctgtgacttttgtggttggcggcatttgctactcttaccttaagtacagggggaaaatagtttctcatcggatgactttgattgacatcttgacccagagctgcctgaaggtgggtcttctaccacaatttctcaactgcatcttctaaaaaatgggactaataggccaggagctgtgacttatgcctgttaccccagcactttgggaagccgatgtaggcagatcatttgaggccaggagttcaagaccagcctggtcaacatggtgaaaccccatctctactaaagtacaaaaaattagccaggcatggtggcacacgcctgtaaccccagctattcggggagctgaggcgtgagaacagctgaaacctgggaaggggaggttgcagtgtgccaagatcttgccactgcactccagcctgggcaacagagtgagactctgtctcaaaaaataaaaataaaaataaaaaaattatagtaatactagtatattcttttcacaaataagaagagatacatatgtatgtataaatttcaattttctaaaacagtcacaagaaactgttcacagtcgtttcctttggggagaagtatacattttcgtgtcgtttgaactttctaatcgtgtgcatgtccagtttttaattgtcaacataaacctttattttatggaaataagatccacttttgctttctttgttaaaagtaataatttgtaaaaagtcaaaaaaataaaataaaataaaataggactaatagtttgggctcttaattattttatcataaaagtaagtaagataaagtcctctgagtgcctgaaaaaaggtactctctccattcaacaatttataaacaactggggttaaccgggtgtggtggttcacgcctgtaatcccagcactttgggaggccgaggcaggcagatcacgaggtcaggagattgagaccatcctggctaacatggtgaaaccccgtctctactaaaagtacaaaaaattagccaggcatggtggcaggcacctatagtcccagctactcaggaggctgaggcaggagaatggcgtgaacctgggaggcggagcttgctatgagctgagatctcaccactgcactccagcctgggcaacagagcgagactccgtctcaaaaaaaaaaaaaaaccaaatgaaccaggattacctacccaaaggaaggtaaatggctctaccataaagacacatgcatgcgtgtgttcatcgcagcactattcacaatagcaaagacatgagatcaacctaaatgctcaccaatggtggactggataaagaaaatgtacatatataccatgggataccatgtatacataaaatgaaatgagatcatgtcgtttgcaggaacatggatggagctggaggtcattatccttagaaaactaacataggaacagaaaaaccaaataccacatgttctcacttataagtgggagctaaaccattagaacacatggacacaagaggagaacaacagacactgcggcctacttgagggtggagagtgggagaagggagaggatcaggaaaaacaaacaaaaaaaattgtcaggtactacagtacatacccaggtgagggaataaactgtacaccaaaccactgaataatacgtttatataacaaacctgcacatgtaccgttgaaactaaaataaaagttaaaatattttttaaaaaactgggagagaaacccggcgtggtggctcacacctgtaatcccagcactttgggaggctgaggtgagtggatcacttgagctcaggagttccaggaccagcctaggcaacatggtgaacccccatctctacaaaaattagccgggtgtggtggtgtgtgtctaaggtcccagctactcaagaggcttaggtggaaggatggcttgagcccggaaggcagaggctgcagtgagccaagactgcaccactgcactccagcctgggcgagagtgccagactatgtctcaaaaaaaaaaaaaaaaaaaaaattgggagagtggggcttaaatccacgtgatgtcagacacccgggaggcagcgaagcacagaggaaagaccatggattgagagtaactggcaccagccctcactatgccacctgccagctgtgcacctttcatcaattactccacacctctgagcctcagtttcccctgcggtaagatgctgatagcaacggtactagtgcttcccagagctgtgtgatgattaggttagtatataacttaagtgcatccccggataaacagggaagtcttggaacaccacagttttattctatttcaggtcttaagctactacgacttatattgtggtaaatctttgaagtcttccaaagcagatctgttgaaactcaaaacagcagtttaagattcccagggctaccttctgccctactcaaaaaattcacaaaatgccaacaacgatgttaaaatcctggtgggagctgtcgcagagctcagccatcaacctttgccacttcctgttcatcagcagtacagccccagcacatggacgtcacagagaaatcctgacagagacaagtttacaataagggtgatgagaatttacagtaaggccaagatatcccgtgaaaaacagcccacacatgtagctgacaacaaaaactctagcctgggaagacggatcaccattccagtgcctatgtaaatccttctagatttaggccttctttaagacgccttcacactgcaacgctcccactgcataaaaccaaccgacatccacaaggcatcaggaccatttgaggggatagggtatctctgtaacaaatgctgctgggacaactgaatattcacctacaaatccttacctcatactgtatacaaaaaattaactcgaatggatcagagacctaaatatgagaaccagaaatataaaactcgtagaagaaaacttaagggcaagtcttcatgacctcggatttggtaagggattcttagatctgacacaaaaccatcagcaacaaaagaaaaaataaaaccaggctgggcagcagcagctcacacctggaatcccagcactttgggaggcagagatgggaggatcacttgagcccagagttcaagataagccttggaaacatggtaaaaccccatctctacacaaagtacaaaaaatcagccaagcgtggtggcgcgtacctgtggtcccagccactcaggaggctgaggttgggaggatcacttcagcttgggaggttgaggctgcagtgagctgtgattgtgccactgcactccagcctgggtgacagagggagatagtgtcttgaaaagaaaaaagaaactggacttcatcagaattaaaaacgtctgatcctgtgcttcaaaggacactatcaagaaactaaaaagaacctacaaaatgggagaaaacatttgcaaatcatacatctgctcagagtccagtatccagaatatacacacacaccccaacacacgcacacactgtatactgtgcatgtgtatatataaagaacaacaacaaaaaccaaacaacccaatttaaaaaaagcaatggacatgaactgatatttctccaaacatatacaaatggcccaacaagcacatgaacaaatattcaacatcactggtcattaagaaaatgaaaatcaaagccacaatgagataccatttcacactattatgggtattaaaaaataaaagtgttggcaaggatgtgaacaaactggaaagcttgtccatcactggtgagaattaaaatggtgcagccacaaaaaaaagatggtgtttcacataagttaagcagtgacctgatgaccctgccagctcacttctaggtatacatccaagagaaatgaaaacatgtccccctagaattacacacaatgtccacagtggcactattcctaagcaccaagacgatgggaacaacccacacgtccatcagcagatgaacggatgaagaatgtggtctacataaacaatggaacatgactgagccatacaaaggaatgaaatactaatccataatacaactcagatgaatcacaaatgcatgcttgcggaaagaagccagacacgaagggccacatgttatatgattccacacatatgaaatatccaggaaaggagaacccacagagacagaaggtagattcaagtcaccaagggacaggagagagagcaacaggcagtgatctgttaacgacgcattcctctgtggtgcaaaaaagttttgaactagagaggtggaggacacacaacattgtaaatgtgctaaatgtcaccgacttgtagacttaaaaatggttaatagggccaggcgcggtggctcatgcctgtaatcccagcactttgggaggccgaggcaggcgatcaccagaggtcaggagttcaagaccagcctggccaacatggtgaaaccccatctctacaaaaatacaaaaattagctgggcatgttggtgtgcgtctgtaagcccagctactcgggtggctgaggcaggagaattgtttgaacctgagaggcggaggttgcagtgagctgagaccgtgccattgcacagcatgatattgaggtgacagcttccagatgtccataagaaaacagctggatcataaacacatcatagaagatacaggtatgttttgccttaaatcgtctcacttcttttttactttatttttttgagtcttgctctatcacccaggttggagtgcaatggcttgatgacagctcaccacagccttgacctcctaggctcaagagatcctcccacctcctgagtgagtagctgggaccacaggcacacaccaccacgccctgctaatttttaaattttttgtagagacaggatttcaccatgttgtccagactagtcttgagctcctgcgctcaggtaatctgccaacctcagcctcccgaagtgctgggattacaggtgcaagccacaccgctcctccctcatctcacttctttaaaaaaaaaaattagtaggaaaaaaaaaaatcagacacactgtgtccaggcatggtggctcactcctataatcccagcactttgggaggccacagccgaaggatcgcttgagcccaggagttcaagactagcctacgcaacatagtgagaccctgtctccacaattttttttttttttttgagacagattctcgctgtgttgtccaggctggagtgcagtggtgcgatctcggctcactgcaacctccgcctcctgggttcaagcgattctcctgcctcagcttcccgagtagctgggactgcaggcgtgcgccacagcacccagctaacttttttgttatttttagtagagacggggtttcaccatgttggccgggatggtctcgatctccagtctgcccaccttggtctcccacagtgctgggattacagacatgagccaccacgcccagcctacaaaaaatttttcaacacaggaagtcactcggcctcccaaagtgctgggattccaggtgtcgtggtgtgtgcctgtggtcccaacgagaggctgaggcagaaggatctcctgagcccaggaggtcaaggccgcagcgagccatgaccgcgccactgcactccagcctggactccagacaaagcgagaccctgtctccaaaaaaaaaaaaaaaaaatcagacacactatctgtgtcgtcagcctcagttaaagccgtgggtcttatcctttactacgagtactccttgtagagagctgtaagggacgtgggtgcagtgactttatggactcgcatgttgtttccaataggtctttctaggctaatgtttttaaaagagcatcaaattacagaacttcagggcgggaaagcctaaaaatatctttacctggaattgctaggctcacatgaactattccctaaaacaggtatctagcttggaccgcttgaaaatgctgttctgaaggatatcctgccaactccatgagcattccaaggaaaacactactgtgtagaagaaacagttaatgcacgaagtcagaaaacaaagccaaggccgggcacaatggttcatgcctgtaatccctgcactttgggaggccaaggcaggaggatcacatgaggtcaggagttttgagaccaacctggccaacatagtgaaaccccatctctactaaaaatacaaaaattagccaggcgtggtagcaggcacctgtaatctgttacatgggaggctgaggcaggagaactgcttgaatccaggaagcagaggttgcagtgagccaagatcacaccaccgcactccaccctgggtgacagcgcgagactccatctcaaaaaaaagaaaaagccaagagcaaaactgagttttatgtaacttctagaatgtagaatgagtttgattttgtaaggctgtgaaaggtaaattaatcttgaggccacacacagtgctaagggagccttttcaagaactgtgtgactggaaacaatgaaacccattgctgaaggccataaaatcacctatgcccacccaaccccacgccagcctcagcgacctcatattgcatggagctctttctttataaatgtttgcctaaggtgattcctatgtgtttcaaagggtctgacgtttcattagcagggacagtgcaacttttcacaggaagtcagctggacataagacagcaggccattcactcagaaccatcggatgcgaaggcaaactgaggacgcgattcagctgagctcggcttgtccctttcacttccaagtgtcaccagtgaggggcacgcattacttgagacaaacgacaaagtggacttttggaagagtggaactgcaaatcaaaaaatcaaagagtagcaatttgggggccacaactatccccccatcccagaagctcgcctcacccaggttgtgccgcttcgccttcgcatgctcgtgaatatgcttctttgtgaaacagccgaagaagacacagtagaggcaggaatgcagcctgttgaggtggacgccacagacatggcagatacaggacttggcctgaaattcagagaagaggaggagtgaacgctgtgtgataagacaggggtgctcagaggaaacagtcaagcaaagcatccccccgagacagctactggaagaaaggacagggaattccatcttcaaggcttactactctagaggatcagtttaatcctttcagttcccccaaacaggacttcattcagatgaaaactagctccccataggaaaactccgtccacaacttcaactgccaaaaccctgtaagctacggggatgttcccccacctcctgctcctgatcctgatgggcaccccaagcccagctcccatccccactgcaggccagcaactcacacctagtcacccttaacctggacatcatttcagatttgcaaatccaggttccaggaccacagcaaatttagaagccaacaagaaaaagggagggagacatgaatcaaagcaatgtacagaagaaagaaaaaggagcagggcattaccaagaaacagacctcacaaacctgaaatgttaatcacggcaatgatgagcacagtggtaaacaaccgttacacccccaaccacccaggagtgccactgactcacaatactaacgggacgtgtgaacagggacagccgccactggcaatagttgcacaattcgagcacagaaatgagtaagaggaattatttatactgagttttaaaagaatccgtaagtccagattgataaacatatacacctactatgtacccatcagattttttaaaaaagaaattaatactatacaaacacaaagtcttcttcgcaggagaattccatctaataaatatcgtaaaaagacaaaaatacaagatcttcattttatgcttatcatagtagtaactaattcaggcaagaatcatcagtagatgctagaaccactgggtaaaaaaatactgtgtcattcacaactgtgaaaatagtagaaaaggtccatatagtcatcaacagatgagtggatgaacaaactgtagcatatacacaatggaatattaattactccaccacagaaaggagtgaagtactgacacatgctacagtgcagactagccttgaaaatatcatgctaagtgaaggaagccagaaacaaagggtcacgtattctatgagtctatttacatgaaatactcaggatagataaatccaccaacacaactcaggacgttgccaggggctggggacagggagaacaaggaacaaataaaaacattttcaaatttgatacaggtaaggcagtgactgcacagcagtgtaaaccacgaaatgttgctgaatgattcctctaaaacagtcaactgtattatgtgaatttcacctggattaaaaaaatatattaagttacataaacaattgtccctcggtatctaggaattgattccaggatcccctcaggtaccaaactccatggatactcaagtccctgatacaaaatgtacttgcaaataacctatgcacatcctcccataaactttcaatcatctctagattacttacaatacctaatacaaagtagatgctatgcaaacagtggttataatatattgtttcaggaataatgacatgagaaaaagtctgtacatgttcagtactgatgcacctatcccttttttcccccaaatatctttgatttgtggttggttgaacccacagaggtggaactcaggccgcttgtgtgtgtgtgtgtgtgtatgtatgtatgtatgtatgtatgcatgcacacgtgtacttgtgtattgaggcaatagatatatacagtttcagagtatcactccagagactacttcagtcaattaaacgggaaaagattacctctacaacaaagaactctggccaacgccaccctaaccaaacttatccccaccacagagcaggcaagtgcagagaacaacatggcggcgcctgtggcgtgctcagaccaacacgacccatctggaacctgctcctgagaagtagggaggtatgtccaaattgaaggacttctgcaaaatgactgacctgagctcttcaaaaacattaatgtaatgaaagaaaaataggctaggaatttctagatgaaccaaatctaaagacacatgaaatcaaatgcaatccatgatcttggattgaatcctatacgccaatttttaaaggcataaaggatattattggaacaattcaggtatttaaagttggacaatgtatgttagatagtactatttgaaaaattaaactgagtgtgataactgtattgcgcttatgtaggagactgtcccagttcttaggaggtaaactaccatgatgtctacagtcagccctcagatgattcagaaaaaggtacagacataaaaccagttagcaagaagctaacaattgatgaatccatataaatgtatacaatattcattttagcattcttgctatttgttgtaggtttcttattttccaaataaatggatagaagacaactattaaattgaacacatgtaccctacagcctaacgcttcaattcataggtttatacgcaaccaaagacacgtacaaggacttttgtagcattattacttgcaacaccgcagagctgaaaatacaaatgttcatgacttgtaaaaagaataaactatactacagttaattgagtaaagtacacagcaatgaaaaggaacttatgatatactcagcagcgtggatgaatctcagaaacctaacactgaacaaaacaactaaacacaacaagctcctgctgtgctacacactccattatagtctatctctactacacaacctaggactgtgctacacactccattatagtctctctctactacacaacctaggactatgctacacactccattatagtctatctctactacacaacctaggactgtgctacacactccattatagtctctctctactacacaacctaggactgtgctacacactccattatagtctctctctactacacaacctaggactgtgctacacactccattatagtctctctctactacacaacctaggactgtgctacacactccattatagtctatctctactacacaacctaggactgtgctacacactccattatggtctatctctactacacaacctaggatgctcccctgcacgggtttaccaatcaccagggaagacacattttacaggccttatggagccaacacagctaagagacagcttctccaacattattcaagcagccaaccaacaagacaactggcgctaaatacagaaaacagctgtctctgacatactgataaaacctcaatcttatgtctggtatagtcacacaccacatagcaatgtttcagtgaatgacaggctgcatgtacaatggcggtcccagaagattatagtatcatatttttactgtaaccttctctatgtttagctatagaaacacaaatgcttacaaccgtctttcaactgcctacagtgttcagtacggtacgtgctgtacaggtttgctgcctaggagcaacaggctccatctcacacagcctgggtgtgcagcaggctgtaccatctagctttgtgttaagtcactccatgatgttcacacaaagacaaaatcgcctaacaatgcatttctcagaatgtatcctgttgttaaacaatgccaacactgcattattatttttccccaatctacactgtggaacagcacgtccattgataatactgtatcagatttaaatgtaacagaggcagacacaggagtaaggtagcacatgtcttccagtgtctggaggaggccaggaatagcctctggagtggctaccctgcaaacactttattttggacgtccagtctcataatttgagatgaaatttctgttgttctaagttaatcggtttgtggtggtttgttacagcaggcccggtcactcacatggggttcacattcatttttattctatctcctttcacagcactgtaaagtagaaaacacagccaggcgtgttggctcacgccaggaatgcagcactttgggaggccgaggtgggaggacagcttgaggccaggagttcaagaccagcctgggccaaatggtgaaacctcatctctacaaaaaatgcaaaaattagctgggcatggtggcacacacctgtagtcccagttactcaggatggtttgagcccaggaggtcaaggctgcagtgagccaagatcgcaccactgccctctagcctgagcaacagaaccagaccctgtctcaaaaaaaaaaaaaaaaaaaaaaaaaaaaaaagttgaaaatgcattccccaggcacccttgcagctcatgttccaaacatatcttgagacacatttgcagacgatgcggttggtgagtaagctaaggagagaggcccagtgggggcatccacaggctgacatggaccgtggaggggtggcactgtttaagcagcccagcacaccactttctggtgtggtggctcctgcagaggcaggattccccaggctggcgggttttcctagaaattcaacctagaatctactactccatagcccttgcaatgatttctgaattaaatccttttctcctataaattaattcaagtagattcagtagactgcaagcaaatcctgaaacataactaggatttgtatgtgacaggaattagaagaggatcaattatttaattgttgttgatcttatgcagtacagaaacaccctgccaaattcattaatttggtcccgatattaagaatattcctctgaatatcctgtcctcttatctccccactcacactacctcccaccccaagaaggatgcggaggagcaagaggggcagagcccttgtagtcaaccagacttaccctatgggatgactcaacagtacactgaattttgagtccagcttttaaaagtgtgcaaacatgacacaccaccttaagagctagtgcacttttcacacattacccatgacttcctactggtctaaaacctgagcatcttaggaaggtaagtttaattcttgtgcattctcttcagtgactttttcaaggactcaaacactgacataagtgaagggacaggtataattttttttttttttgagaaggagtcttgctctgtcaccaggctggagtgcagtggcgtaatctccgctaactgcaacctccgcctcccgggttcaagtgattcccctgcctcagcctcccgagtatctgggactacgggcgcgtgccaccatgctcggctaactttttgtattttagtacagatgaggtttcaccatgttggccaggatggtcttgaactactgacctcaagtgatccacccacctcagcctcccaaagtgctgggattacaggcatgagccaccgtgcccggcctaaatattctatcctttatatgaaaaaaaaaatacggcactaaaaagctaaagactttgccaaaattagataatcttctcaaattaagttccccaacctcaaaaacctcagcttccagactcaggcccctcaatctcggagccaaaatcaatctaagggtacagcgactccagacctttcaatttacagaaggggtaatttcattcagcaaaggcaagacctcagactgacctcatttcaaggctgggacccagcagttgccggtgatgtccttggacaggtcaggagacttacttgccaggcctacctaaaaagtgtatcccaactaccaaaaccagaaggaaattacgtatgaaatataaaatatcacagcagtcctcccttacctacagttccgcttgctgtggtttcagttacccacagtcaacctcagtctgaaaatagtaacatggaaatgccagaaataaacaattcataagctttaaactgcccgccgttctgagaaacatgatgaaactgagtgacatcccgctctgtcccatgaccatccctttgtccagcttctccgtgccatctaggccacctgcccgttaagtcacttggtagctgtcttgctgatcacatcaactgttgcggatgtgatcacggataaaagtgaacacaagccacttttatttggcttaatatggccccaaagctcaagagtactgatgctgcaatttggatatgccaaagaaaagccataaagggcttcttttacgtgaaaaggtaaaaattcttaataagaaaacaatatcaaataacaaggttgctaagatctacagtaagaacaaatctatccatgaaattatgaaggaaaaaagtttgcacgtaatacaaatggggttcagtattatctgtggtttcagacaactaccggaggtcttggaatgtatccctcaaggatgggggtgagtactctattatcataaacaggaaatgaggaagcccaagagatgctgtgctgagggacacacacttggacggaagcaaactggggcaaaatcctcctggtactgaccagcttaggctagtcttcctttaaattgagctcacctcacacaactgtcaattacacatgtatggggagcaatcacattatcctaaagcctcattttaatctaccattctcacttaattctctgagtttcttaccagagctgctaacatataataataaaactcacactcaattctatctcaatttctactcttcagcaccctctgctacaggtactggccaacataaaacaagaggcaagaaaaagactcacatatccattaggcgggtcattttaatccttgaaaactgagtttacttcctacctaagcttccatccgcttaataccaaggtgatcaagtctgtgtgctaaatacaggaaaagccttaataggagaccctgctaccaatttgtaggaaataggacaaaaaaaaaacaaaccacaacactttgaacttccactgttgagtatgcaaacagcaaaatccagactatagggaagtcaacaagtcacaaggcccaagtttttcaacagataaagtagaagcaaaaaactgtaagaaaggaatgaagagagaacctacagattaagaaacttaaacgacttaccagtatagccacatgataaataccattaaaagaaaaaggaatgaactttcggctgggcgcggtggctcacgcctgtaatcccagcacttcgggaggctgaggcagacagatcacaaggtcaggagatcgagaccatcctggctaacacagtgaaacccagtctctactaaaaatacaaaaaaattagctgggcgtggtggcaggcgcctgtagtcccagttactcgggaggctgaggcaagagaatggcgtgaacccaggaggcggagcttgcagtgagccgagatcgcaccactgcactccagcctgggcgacagagcaagactccgtctcaaaaaaaaaaaaaaaaaaaaaaaaaggaatgaactttcaatccactcaatggatacaatggatattgctagacaaaagaagccagtatgaaaaggctacagactgtatgaacccaatgatatgacattctggaaagggaaaaacctccgagatggagacgagaccagtggttgtggagagttagaaggtgaagcacagggatttcttggggcagtgcaactgttctgtacagtactgtagttgtggatgcctctgtcaaaatccactgagctttaaagcacaaagagcaaaccttaatatatgcgattttaaaaataactgatgaggccctatggaatgcaggctgaggcagaagaaaccaattgtattacacatataggacacaactccgccaagaggggtggggagggaagtacctaagtaatgtggaaatgaggagggagtgtaagactaaaagcaaaaggaactgtaactgagcactgtactgtaaggggggggggggtcaagtcatttcccaagggagtacaggacaattctgaaacctctcttcatgtataccaaagcacaacaggtaagtaagtagattgtcgacagtgggagccagcattttctctgctggacagagaagttacagataaactggaggggaaggctagaataatccctatagaaatggattagagttggagatataaacatgaactcatgtagagcttaatagggatgctgatgaatatatatcaaattacagacgtgtatatgcacgcatttgtatatacacacctgtttcccagctctgtcccttgagggggccaagaagccaggatatcccagtaatgatgaacacaccagtgcccagatcttgagatctaattccattctcccaaaaaagaaactagggatccttggaaaatgctggagtctaaggctggggcagaaaacacataagatgatcccagaacatcgtgtagttccagaaagtaaggaagtgctcaaaaacaacgaacaaaaaataatgtggctatgtgaaagggacaccggagccagctgaaagagctcccagtggatacagccagatgatgggagcaacacaacaaaccacacagcactggatgataacccaaagcatacattcaatatccacaagtccatgttgatatacacaaatgaataaacacacgagtgaggatcagcaaatcttccatacataaacgttccaaataatttaagtagctactccatcctcaaggaggaggaacagaactccccaccccggtagagtacctatgcagagtgactcccttctattataaacagtacataaaggagggaaagagtcactccacagtggagaaacctggcaaacatgacttcggccattcagtcaagcccagcaacccaagacatcttgacagcatcatccttaatttacgggaatgagaagggcacttcatctccctggtcttccttcccaaaactcataaccacagctgaatcatgagaaaaacatcagaaaaccaaaactgagggacattctacaaactacatgaccgggactcctcaaaactctcaaggtcaccaaacaggacagcctgagaaactgtcactgtctagaagagcccaagaggacgtgaagactcaaagtaatgtgggattctgagacagaataaggacattacataaaaaccaatgagttctgaataaagtatgcagtgtagttaatgaactaaatacacaaacacaaatgagtagaagtaaaagcggggaaatctgaatgagatggtggattatattgaagatagactgtatcaatgtcaatattctggtggtaattgtactccatttctgcaagaagttacccttagaggactggggaaagatacacaggattactctattttcttacaccagtatgtcaatctacaatgacctcaaaattaaaaccttaaacagaaaaatgtttacattttagatcttttacttagaccccacttagtatgaatggtgtaatgttttgttgtgatgatttgaaagatccagttcactataaaataaaaagtaaattcctcaaagaaacaaagttttaaagtatacttttaaaatagcacatatcatcccagcactgtgggaggccgaagtgaatctcctaaggccaggagttcaagaccagcctgggcaacatagggagactcagtcttttatttttttttaataaataaataaatacaatagcacgtatcaggaaaatgagctagactatgaaaataaaaacaagtaatgagagctctctacaatgtgctcaccaccatcccagcacctggctgagccagtaaagacagactgaggcattgttggatggctgggagaggtggctcatgcctgtaatgccagcactttgggaggccaaggagagaggatcacttagctcagaagttcaagaccagcctgggcaacatggcaaaactcatggctaccaaaaatacaaaaattagccaggtgcggtggcgcatgcctgtagtcccagctacttgggaggctgaggcaggaggatcactggaccccaggaactcgaggctgcagtgagccatgatcataccactgcactccagcctgagtgagagacagaccctgtctcaaaaaaaaaaaaaatacataaaaaataaaaaatttaaaaaagtgttttgaggacacagtgccataaaattttagattcaaagagagaaatggttttaaaaacattacctgttctccaaagtgtctatattcaaaatataatgtagaatgttaaatcataatcacttcctgccagttcctatctttacagacaaaccctgaaatggtaagaaatttgttatatttaacacacaccaaaaacacaaaggagacgccactgtggtcgtgccagtcctaaatcatggaaatagtttttttctttttttttgagacggtctcgctctgtcgcccaggctggagtgcagtggtgcgatctcggctcactgcaacctccgcctccctggttcaagcgattctcctgccccagcctcacgagtagctgggattacaggcgcgtgccaccatgcccagctaattttgtgtatttttagtaaagacatggtttcaccgtgttagccaggatggtctcgatctcctgacctcgtgatccgcccgcctcggcctcccaacgtgctgggattacaggcgtgagccaccatgcccggcagaaatatttttatagtctgcaatacaagagttttatggcaattcgggccaggcgcggtggctcatgcctgtaatcccagcactttgggaggccaagatgggcggatcacctgaggttgggagttcgagaccagtctgaccaacatgaagaaaccccatctctacgaaaaatacaaaattagccaggcatggtggcgcatgcctgtaatcccagctacttgggagaatcacttaaaccctggagggggaggctgtggtgagccgagatcacgccattgccctccagcctgggcaaaaagagtgaaaaccccatctcaaaaaacagagttttactgcaattcaagcttcttttggacagaaatttatcaagcctggtcatgtttttgtcatgttctgcctgttaaaagaagaatcaaagtttgggtacaaaatgcataatccatctgtccttagataacaaaactcgtaattcctattcattcagggattcatttctttaaactgtacctgagatgtccatctcaaaaagtacctttgtttgtttacaaagattataattcaagttgaagtttgttttgagataggttttgttgtccaggctggagtacagtggcacaatcatcagcttaaagtacttttacagtcaagttcatatcattaaaaccaaaaatatggctgggctcagtggctctggcctgtaatcccagcactctgggagacaggaggatggcttgagtccaggagttcaagaccagcctgtgcaatatagtgagacactgtctctacaaatattagccggtcgtggtgacacacgcccgtagtcccagctactcaggagaggctggagtccaggaatctgaggctgcagtgatcactgaccagaccattgcactccatcctgggtaacagagcaagactctgtctctacaaaaaataatttttaataaaataaaatttaaaaaacaaaatgtcctaagcttacagatctgatggaaatcctatgcagattgtccaactgttaatcatcaggtttgttaaactatttcccaaaccaactcttccttaactgggccactagagagtgctagaaatgcaggacaccgcacatgaagtgatacaggtaaataagtccccccagtcagaggaaaaagcatggagggcttaagggctccttgctggcacactgccaactggcactgcagcagcccccacctaaattttgaaagaaatatttttcactacccgactacagttcaacttctaattggtgaataacatacatgtggctcaacagttttgaaactaagcaactgacatctgaaattaaaagattaatcagagccataagtagcgcaaaaaaaaaaagtaattcttaactttaggaaattaggcaaagttagttaatgatggtttaaacttgactccttctatttggttaaaaaataccagaggggggaagaaagggagagggagggagggaacggaaaaagaaaaggagggagaggaagagtggggcggtccccacttcatccaaagtagtaacaaatcttgggcgcgtcacgtcccaatccggacactactgacccagagtagcaacagcacattccctgtagaagactggcttcaaccaggccacccttttttttttttttccggagggggtcttgctctgtcacccagtctggagtacagtggcgcgatcactgctcactgcaacctccgcctcccgggttgaagtgattctcctgcctcaacctctggagtagctgggattacaggcgcccgccatcacacccggctacttttcgtatttttagtagagatgaggtttcaccatgttggccaggctggtctcgaactcctgacctcgtgatctgcccccctcggcctccccacgtgctgggattacaggcgtcagccaccgcgccaagccaggccatcttttcttaaagacacacaattctactagcaagactctaactccgatcctgaaacgttttatgtctgattttagttcatccagacataacgctacctgataccattacagataaaaaaaattttgaggccgggcacggtggctcatgcctgtaatcccaacactttgggaggcagaggcgggtggatcacctgagatcaggagttccagaccagcctggccaacatggtgaaaccccgtctctactaaaaatacaaaaattagccgggcgtggtagcaggagcctgtaatcccagctactcaggaggctgaggcaggagaatcggctgaacccgggaggcggagattgtagtgagccgaaatcgcgccactgcactccagcctggggtacaaagcgagacttcgtctcaaaaaaataattttttttttgaattactgcttaacataccctacaatctcagcgagcctgttggtattcccataaataaaaaaatgccactcaaggtggaaactgccctcacaactcccaatctcggattgtaatctacaaaagcgcgtgaaactgtaaaaataaactttattcacatagaagaatcacgttacgttttgatttccaaacccttaccaagcctaactgcgggacgcaagactgggctccccgaggggactcactcctggttaaggcctcccacagcccacggcgcgcttccaagtctactcctcagccgcaacgcaaacccgggctgtggctccgcacccacaggctcgccccggccccagcccctgccgccctccacctccagctcctcgcgggccccgaggcagccgcgaagctccggccccgcgccccccagcccgcctcctgccccagctcccgtccaaggtcgctcctggcggcgggtgaccgctgcagaccaacgcccagaactcgacagccccccatcctttactcatttttttgaaatatttctttctctgcacccgcatccagccccgaaccctccagaaccaggagagttccccgcaaggacctcgcgcaggaacgcccgggaccgcccaccgaagtcccaggctccccaggcagcagggcaggagaacaccacccccggcccggaagcactcgcccctcccgggccaagaaggataagggagggggagggcggagagaaaggagggggaggggacagagaggagggggaggggacagagaggagggggagggaaaggaagaatgggggaaggggggagaggggaaggataggaagatgaggagataagggaagggagagagttgaggggggaaggaaaggagggggaaggggtaaagagaagagagggcagaaggagagaggaagaggaaggacagggaaaggcaacgggggaagggaagagggcaggaaaagggcccctccgccggccggcctcaggagcggcagaaggccccgagcccgccgcgcggtgggctgccgggcgcaccttgcgcttgcgggcctcagccgtgccgctccacacgaagcactggtagatggcccgcaggttctgcttccagttgtccaccttgaagctgcccaggtgcgagcagcccggcggcgctaccgccagctcggcgtccatggcctcgccctcgggctctggccgggacaccatggggggcaaggcccggccgcgcgcggggggcggcggcgagggaggcgaggacgacgccagcgcggcgtgggggctgctcggcggctggccaggctggccaaggcccgggcgccgagaacaaagcgcggaggccggacaaagatggggctgcgcgatcgccgaggggaggctgcaaggcaggcaccgcccccgagctgcggctgctgcggaccgcctgcgctgcgctctcgcggttcgcggagggtgtcgcggggcggggcgccgcggccgcggacggagattacgtcaccccccccccccctcccggccggcaccgcactgcgcagtctccagcccgcgccaggcccttcccccacactcgcgcgcccgttaggctctgggtagacccgcgcccgaggaagcgtggtaggggggggaagctaacgagggcccgcccctccccttcctttattggtagtaggccaccccccccccccccccggcaccttcggctattgtcataggctctcagtatagtccgtctggtacagagccgcctcccgggaccctggcggctagacgttccctgtctcttccagaggactggggaggcgggggcgtgctgcggttgggcggcgcgagacgtcagtcctagcactgaaccggtttgcgccggcctgagctctgccgcaaagaggcggggcgatgagctggagcgccgcaggtcgggcctccatccagggcctgcgctttcccacccaaaagcaccccctaatcgggagctgtttgcagggcccccggttgccgtaacctggctcgggccctgcagtgccgtggcccggggctggaactgcctgccaactgcctggtaggcgctgcccccggccgcaagctggggcgcctcctgtcgggagcccgctgatagtgagggccaacccggcgccatccagtttaaagaggcatctgcgcgccacacgcctgacacttcacatttgctagtggctacatttttctaatgaaaaaagaaagttacagtaatatatctcaacccaataaagtcaaattatttcagcatgtaggcagtattgcaaaatcgttagtggaatgttttacagtttttgcagcaagtcttggaaatctggtatttacacttaaagcacatccaattcctactagctgctaccgcagtgggcggcacaggtctaatcggtatacaaataactgacccaaggcaaactgagaagacatttaaagacgaatgcaaacgaagttctgggggaaccagggcgccaagggtctgggggaacttggataaggtgtcaggtgtggagctgctcccctgtactcatcccgctgctaactgctttgctcattcattcatccacagattgcaggaaacagcaattgccgtccagaaccatcacaagttaaaaaataaagattgtgatctcacaacacttaaagctacagggtttaatggactgacgactgggataaagcttttgtggccaagacaaattgccgagcacaggtttttgcctcatggccttcgtgcttgcagtaccctctccctaaaatgctttccctaccccctcaccctctgcatccttatattccatgtctgatgctcgctcacctccttccagctttatcacacacctccttttccgtgaaaaggaaaattgccaccctaatgaaaattgcaagccccccaaaattctccattcccttaccctgctttgtttttctccaaagaatttatcactatctggcgtaatgaatatttacttattttttttattgtctcttcccttaatagcatgaaaaattacgagagggtaatcttttttttttattttttatttttgagacagagtctcgctctgttgcccaaggctggagtacagtggtgcaatttcggctcactgaaacctccgcctcccagattcaagcgattctcctgcctcagcctccccagtagctgatattacaggcgcctgccaccacgccgctaatttttgtatttttagtagagaggggctttcaccatgttgatctggaacttttactagaaatggggtttcgtcaggctggttttgaacttctgacagcaagtggtccaccagcctcggcctcccacagtgctgggcttataggcgtgagccactgcgcctggcctccaagagggtaatgatattgtgtgttttatgtactactacagccgcaagttcccagaactgtattggctacatgcaggtactcggaattacccggtgaagccctatagtagtcccagctactccagaggctacggcaagaggatcgcagagcccaggaggtcaaggctgcagtgagctgtgattgtgccactacactctagcctgggcaacaaagcaagaccccatctctaaacaaaacaaaaccctgccgaattaattaacccgaaacacatttacagaaaaatctaacgagaccatttctagaataaaacacttgttaaggaaaaccatgtttatgttagaggaaagaatgtcagcttacaaaaaactaaaatcctaactagtaagtcaggaattacaaaaatatgtgatccatctctataaatattgatgtaaggagttttctcatattgttgggcttatacaaatatgatttggcttcacaaatgtgcacttagcattcaggccctaatatttattatctttttttttatcaatacgatcatctaagcacagaagaatatctgtgctgtccacttgaatcaattataatgatttaaatgttccataatcagaacaaccttagtgattttaaaaaatttaaactacagaatatactcttgagaagcagtccccaaaagatgtatggatgaagtgctttttttctaatgggaaacaaatggaaacgttaatgacgattaataggagaatcattgaataaatgatggactagccattctagggaatagtacacagctattaaaaagaatgaagtccagcttgggcaatgtgatgaaaccctatctctacaaagaaattaaaaaaaaaaaaaaaaagccagttgtggtggtgcacgcctatagtcccagctacccagcaggctgaggcgggaggattgtttgagcataggaggtcgaggctgcaatgagccctgatcatgccagtgattccagcctgggcaacagagaaaaaaaaaactagatctgtaagtactagtacaaaaagtcataaaacataaatgaatacaacaaattgcagaaaattacagaaaatatgctgacgtttgtaggaaaataatggaaggcctggaagaaagaaacacacccatcaataacagtaacttctggaaaggaaaaggtagatgtgacttaatctgtaatgtttgaatgttttcttacaatgaaaattaatatattcctttgtatttaaaaatcactaaaacttaaaaagaaatgacaaagtgtcatggtacgagggaacacactgttctacaacatgtagaaaacagtggcccacatgttcagtatatgcatttattcatgtatccaagaatcaagtcagattgctaaattacagtcaggctctgccacctactatctgtgtaaccttgggcggattgcctaaatttctcagcctgttcacttatctgttaaaattgggagaatatcagctctgtgcttacgttgaagtgtatggcaaggaataaatgagataatccatacaaaactcttagcaagtgcctgttgttaataagggctcaagaaacattagcagttattgatctgatagttgctggcaattgagatgattacaacaatttcttgcttcaagaatcccaggaggatgggagaggagaatttttttttttttaatttaaaaaaaaaaaggccgggcatggtggctcacgcctgtaatcccagcactttgggaggccgaggcgggcggatcacaaggtcaggagatcaagactatcctggctaacatggcgaaaccccgtctctactaaaaatacaaaaaattagctggatgtgatggcaccattgtagtcccagctactcagaaaatcgcttgaacccgggaggtggaggttgcagtgagccaagattgcaccactgcactccaacctgggcgacagagcaagactctgtctcaaaaaagaaagccaggtggcctatgcctgtaatcccagcaccttgggaggccaaggtgggtggatcactgaaggtcaggagttcaagaccagcatggccaacatggtgaaaccccatttctactaaaaatacaaaaattagccaggcgtggtggtgcatgcctgtcattgtagctacttgggaggctgaggcaggaggatcacttaaatctgggaggtggaggttgcagtgagccaagatcgcgccactgcactccagccttggtgatacagtgagacggtgtcttaaaaaaaaaaaagaatcccacagtgtagtgtgcttagtagcaatattgccagcaacattagcgggatgttataggaatataaaactgcagcgataaaggaaagtctaggtaatatcgtaatactccaagacacctctttaccgtaatcctccccagacaggtatggtggaggagatctggaaatgttttttgatgccttacctaggtatggaagacagggttttttttttgttttgttttgtttttttgagatggagtctcgctctgtcacccaggctggagtgcagtggcgcaatctaggctcactgcaagctctgcctcctgggttcacaccattctcctgcctcagcctcccgagtagctgggactacaggcgcccgccaccatgctcggctaatttttgtatatttagtagagatggggtttcaccttgttagccaggatggtctcgatctcctgacctcgtgatccgcccgccttggcctcccaaagtgctgggattacaggcgtgagccaccgcgcccagccgaaagacagtttttaaaaaggagtgtgacctggtcaggtttttgcctgaaaaggcatttcccaccatccatgagactaacacagcctaaaatgttattttctaaatttttgttttcaaatttaaaagaagttaaaacacccatggaattatggttcctagatggtcaagtaataatcctagaccaatcctccctcatataacaactatgaactgtggacataatgcaagcacaaatatctaaaggctttggagagtgaaccaaagcaggcagacctagttaggtgcagacacatggaaaaagggacctgcccaataggagtaacccgatgtcgatggtttatagactgaggacaggacatacttggcatctagacaggaagcctgaaactctgatagaaaatccatggtatttctggactgaagaagcagaagacagagtacagagcaaccaaagccactgaaaagtgagaagagattcagagatgtgaagccgcagaatctgtgcataaactacatccaggggtccagttgaccaccaaaccactcctatggggcaaattccaagcagccaaactagaacaaaaagaagtgagcggagatgtaagctactagtcaagaaaccactaaataccattaattgcctgctaaaacaaaaatattaactgtctttggaggtatataacaaaattcatactttcaacaacataacagtagtaatgtccaggatatgatccaaaattattattattattattttgagatggagtttcgctcttgttgcccaggctggagtgcaatggtgcgatcttggctcactgcaacctccgcctcccaggttcaagcaattctcctgcctcagccttcagagtagctgggactacaggcatgcaccaccacgcctggctaattttgtattttttagtagagacagggtttctccatgttggtcaggctggtatcacactcccaacctcaggtgatccacccacctcagcttcccaaagtgctggggttacaggcatgagccactgcgcccagctcaaaattatttgacatatgaggaaacaggaaaatgtgcccctttttaagaaataaaacaagaaagatgatcaaccataagatatgtcagatatcaaaattagtatatgaggaattcaaagcagctatggtaactgtgcacaatgaggtaaaggaaagtatgtttgaaatgaatgaaagatggaaaatagcaatgaaggccaggtgcagtggttcacacctgtaatcccagcactttgggaggctgaggcagcaggatcgcttgaggccaagagttcaagaccagcctaggcaacatagtgagaccctgtctctacaaaaaacaaattccagcctaggcaacatgatgaaactctgtctctataaaaaaaaaaaaaaaaaaagaaagagctgggtgtggtggtacacacctgtaatcccagctacttgggtggctgaggtgggaggatcacttgagcccaggagttgcaggctatagtgagccatgatcacaccactgcattccagcctgggcaacagagccagaccttgtctctaaaaaaacaaaaagaaaatagcagtgaaataaaaactatacaaaagaatcaaatagaaatcctggaactgaaatatcaatatctgcaataaaaaggtcaccaaatgggcttaaaggcagaatggaaatggcataagaacaaagaaaaaatagttgtaagaaaaaaaaaaacaaagtctcagaaacctgtagggcaatatcaaaggctgagaatatgtttaattcaagtcctggagggaaaggtggaagaatgagagagaaaaaatgtctgaagggatactggccgaaattttcccaagtttgctgaaagatacaaatttacagattcaaaaatgctgttgaattccaagtaggatcaatgtgaagaaaatgcatataagcccattatagtttaactgctgaaaacaaatagtaaagagcaaattttgacagaagccagaggaaaataagacattatttaaaggggacaatgactttcttcttatcaagaaaataagagggccaggcgtggtggctcatgcctgtaatcccagcactttaggaggctgaggctggtggattgcctgaggtcaggagttcaagacaagcctggccaatatggtgaaaccctgtctctactaaaaatacaaaaaaaaattagccaggcatggtggtgtgtgcctgtaatgccagctacttgggagactgaggcaggagatagcttgaacccaggaggcagaggaggttgcagtgagccaagatcgcaccactgcattccatccagcctgggtgacagagagagactctgtctcaaaaaaaaaaaaaaaaaaagaagagttgcaccaaaatctcagaaatcaccactaaagaacttattcatgtaaccaaacaccacctgttccccaaaaacctattgaaataaaagaaaataggaaaacagtgggtgccagacaacagtggaacagtattttgaaagtgttgaaagacaaaagttgtcaacacctatttctatatgtaatgaaaatatccatcagtgataaagataaaataattaaatttcatataaaagaaagttaagataatgtttcttcagcaaatccgtacaagaaatcagggccgggtgcagtggctcatggctgtaatttgggaggccgaggtgggcagatcacttgaactcaggagtttgagactagcctaagcagcttagcaaaaaccctactcaacaaaaaatacaaaacttagctgggcatggtggcttgcacctgtagtcccaactactcaggaggctgaggtgggaggatcacttgaacctgggagatggaggttgcaatgagccgagatctgtcagcctgggtgacagagcgagactccgtctcaaaaaaaaaaaaaaaaaaaaaaagagaaggaagttctatgggcctacgggaaaaagtaccagatggagacttggatattcaaggcatgaaatgaagagcatcagaatacatatgatgatttaaagtgaaaatcataacattgtttccaatggtttataatatatgcatagatacaatgcatatgacaactgttacacaagggacaggaaggaggtgtaaatggacttataaagttctaagatttccatattttatgtgaagagctacaatattaaatttaaatagattatgaaaacacacaggttgatattataatccctagaatagccactaaaaaatgatgcaaagaggtgtaactgaattttttttttgagacagggtctcactctgtcacccaggctggaatgcagtggcaggatcttggctcactgcaacctctgcctcccaggctgaagtgatcctcccacctcagcctcctgagtagctgggactacaggcacatgccatcaccccagctaattttttgtatttttcttagagacagtgtctcaccatgttgcccaggctggtctcaaactcctgaactcagatgatccacccactttggcctcccaaagtgctgggattataggtgtgagccaccatgcccagccagaaaatagaattataacaatattcaaataacccaaaataaggcaggaagggaagaaaaagaggaacaaaatcacagagaacaaacaaaaatcaaataataaaatagcagacgtaactacaaacattatcaataattcctttagatgttactaggctaaatgtcttccacttccacctgtgatggagtgtcaggacagattttgcctcctgctttaaacaacaacaatgaaaaccgagacaaactataagaaacattggtttccaggcagggcgcagtggctcatgcctgtaatcccagcactttgggaggcggaggcgggtggatcacgaggtcaggagattgagaccatcctggccaacatggtgaaacctcgtctctactaaaaatacaaaaattagctgggcgtggttgcacgcacctgtagtcccagctactcaggaggctgaggcgggagaatcgcttgaacccgggaggcggagcttgcagtgagcagagattgcgccattgcactccagcctggcgacagggcgagactctgtctcaaaaaaaaagagggagaaacattggtttccaaacaccggaaaacaggaagtgcagaaccgtgatttgagccctgcagctctccagctgctgcctggacagagcttgcaggctgcagtatgaggccaggcagcccagtgcagggcacctgagattccccagctttgacgctgagagtcctggtcctgggaactcctcagtcctggttaaactgggaaggtcggccactctcccagacagagaccaacacgtttcatgagttgacaatgtagggaggtaacggtggctaggattcacaggacaaatgaccaaagagagctgcacagagactgcatttcagaaatctgccactgatcccctcaaggctttttgcttacaggccagtgtaggttgacatgtcgtggaggctgcaagttaagtttttactgaaactacatgaggcaggggaaataactgccagaaaaaagcagatggaacagttcctggagcttgcagggctagaaatagttcacattccgaacagccagagtggagacacctggtaatacataggtcatcaggaagggggctcaggagggtgttgccttagtagtgggagcaaagtagccctagaataaggctgatctacctggtcattccttataaagcataaaagcttaaaaggaacaaactgcttccagtaacttacctgtgatccagaacaaagcctctcaaacgtttaaggaacacaaaaccaaaatatttttcaaagagaaagaaggggatgggaaggagaagcaccaaacaaggtaaaaatttcagtgtctagcatccagtcaaaacttaccaagcctgcaaagaaacagaaatacgcaacctataaagaagagaaaattcaatcggcggaaacagacctcaaagtgaaatgcgggacacagatttagtagtcaagggcactaaaatggctactgtaaatacattccgtctgttcaaaaagctagaggagagattgaacatgttcagtagaaacatggtagatataaaaaacaaacaaaaatgaacagagctgaaggacaacttcaagcaacctgattacgtggaattacggtctctgtaggagaacaagtagagccaagtatccaaggcattccaaacatacaagttttccaaaactgaatcaagaatcagtttctcaatttcaatttcaattaactaaaattaaataaaattaaacattcagttcctcagtcatgctagtcagatttgaagtgctcagcagccacatgtggctagctactactatatcagacatgacagatgtgaaaacatttgcatatcttttttttttttgagatggagtttcactcttgttgcccaggctggagtgcagtggtgcgatctcggttcaccgcaacctctgcctcccgggttcaagcgagtctcctgcctcagcctcccgagtagctaggattataggcatgtgccaccatgcccggctaattatgtatttttagtagagacgaggtttctccatgttggtcaggcaggtctcaaactcccaaccttaggtgatccacccaccttggcctcccaaagtgctgggattacaggcgtgagccaccgtgcctggccccacatatttgcatttttttttttttttgagacagagtctggctctgttgcccatgctggagtgcagtggcgcgatctcggctcactgcaagctctgcctcccgggttcatgccattctcctgcctcagcgtcccgagtagctgggactacaggcacccaccaccacgcctggctaatttttttttttttgtatttttagtagagacggggtttcaccatgttagccaggatggtctcgatttcctgacctcgtgatccacccgcctcggcctcccacagtgctgggattgcaggtatgagccaccgcgctgggccaacatttgcatatcttaagagcgtgtcagcttgggtgggtggacagaagggataggtcacatgcacgactgatccagagacctgggccatgtggccactccccacttgaagttatgggatcactgacataataaccatagctagtggtcagctcagtccctctagttctcaaaccagaacccaggcagagctcagttcatagttgggttcaacctcagccacacagactgcaaacggcctgggtccttccagttgtcaggtgaagatgtaaagcaaagtcaccgactttggctttggatcccaggcagtcctctgcagggaggctgtggggctttccatgcaggttctgggtgatccttcaaaacctctcttctggctgggtgcgttggctcacgcctgtaatcccagcactttgggaagccgaggatggcggatcacttgaggtcaagagttcaagaccagcctggccaacctggtgaaaccctgtctctacaaaaaaattagctgggtgtggtggcgggcacctgtagtcccaactactcgggaggctgaggtgggagaatcgcttgaactcaggaggcagaggctgcagtgagccgagatctcaccactgcactccagcctgggcgacagagtgagactctagctcaaaacaaaacaaaacctctcttctagtccaatttcttttcacgttactaagggcctgccaggccaaccctggatcccacagcaacacatcctttcccgttggaaatccagaggacagtgactgctttccaccacataggccagctgtgaaaatccctggaccccccttcaccatacagtgcaacctcaccatatgggggttcgtgcagctcattatgagaatcacccactcatggacaccccatacaacctcaccaagactgccatcaccatgggagagcctggcttgtctatcaacacagacaccacttaagattgagagccttgaagggtaaacagggtacccggaggcatccagactgaaggagtgagggccacactgtgaagggaggtgtgaggatgaccctaggaccacagcttgaactggatcccaaaatgccctgggcacagtgccacctacagcttcagaaccatctttatcttatcctgtccacctgggagtcctccttccccgtctcaccgtgatgacctgcaggagtgtctcttagccacagtcctcctctgtgattgtcaacctatagaaaatgtaaactatagattttagagaaccttgttctgtaaaatcacggactgtcagaaactttgctgtttgaaaccatgttagtgagactggaacattctttgacacaaagaagcagcctcaatttccagctgaaacaggatttttctcttctttctttctttttttttttttttttttttttttagaaaagagctttttaactttgggaggctgacgtgggcggatcacgaggtcaggagatcaagaccattccggctaacacggtgaaaccccttctctactaaaaatacaaaaaattagccgggtgtggtggcgggcgcctgtagtcccagctactcaggaggctgaggcaggagaatggtgggaacccaggaggcagagctggtagtgagctgagatggcaccactgcactccagcctgggcaacagagcaagactcggtctcaaaaacaaacaaacaaacaaacaaacaaacaaaggagctttttaagcacaacatcctacatttattttaactttgtagtttctaagggaacaggaccctgggtcggcttctgatgttaacccctttatagctttacacacataatcctgcttgcttcacgcctatccacaacactgattcatttatattgtacctaacctccaccctcctccagatcctgtaagaaccctgcctctatgtggccaggcgcagtggctcatgcctgtaatcccagcactttggaaggctgaggcgggtggatcatgaggtcaggagatcgagaccatcctggctaacacggtgaaacccctctactaaaatacaaaaaattagccgggaatggtggcgggcgcctgtagtcccagctactcgggaggctgaggcagaatggcgtgagcccaggaggcgaagcttgcagtgagcagagatcgcaccactgcactccagcctgggagacagagctagactccgtctcaaaaaacaaacaaacaaacaaacaaacaaacccttcctctacctttgtttgaagaggacaccaggttcctcaggtaagtgatcactcttgctgcaaggatgctaagaaatccattgttttgggactacaggtttgtccctgttaggttgtattaccgtcctggaaatggtacatttatagcctaacaaatatacaggaatggatttttacatccacagagtagagaacaaagagaaaaattgcccctctgtcatcacagaactttacatcatgttttctaaaagtttaaaactcaaaaatgtggccgggcacggtggctcacacctgtaatcctagcactttgggagactgaggcaggtggattgcctgagctcaggaggtcgagaccagcctggacaacacagtgaaatcccacctctactaaaaatacaaaaaaattagccaggcatggtggcgtgtgcttgtaatcccagctacttgggaggctgaggcaggagaattgcttgaacccagagggcagaggctgtagtgagccgagatcgcgccactgcactccagcctgtgtgacagagtgaaataccatctccaaaaaaaaaaaaaaaaacctcaaaaatgttccctaatgtgttattcccgtgaataactcatgtgactcctgtagagacattcagtaacaccctcccctttgaacttttgaactgatgctgaaggagagcccccttattataaaaatgcacgtttagatctcttttcagatgtgcagcctttttttttttttttttttgagacggagtcttgctctgtcgcccaagctggagtgcagtggcgcgatcttggctcactgcaagctccgcctcccgggttcacgccaatctcctgcctcagcctcccgagtagctgggactacaggcacccgccaccacgcctggctaattttttgtatatttagtagagatggggtttcaccgtgttagccaggatggtctcgatctcctgacctcgtgatccgcccacctcggcctcccaaagtgctgggattacaggcatgagccaccgtgcccagcccagatgttcagcctttaaaaaactgttctatggaatgttagaatgaatatcacactgaagcctcaaataagcaccagccacccaactgaaagggtgaccaacttatggtcatcttgtcagaaattgcatcctctcagctgaacccacagctagggttgcggcaaggatgttcccttgtctggtacccttgttcccctgttcccttgttccctggtctggtaccccagaccagccctggatgggattccaaagaaagaagcaccaaacgccagggtgaccagtgcaaagcatgcattagggcgcttacatacatagggctgtcacaggcctcaggtggccttcagggaaatgggtgccccccggagaggagcccttggagaggggcgtggggaaggtgtcagttgctacatgtttagcaagatgtttgatcttgaagtgttttggacaacaacataagcaagtttatcagtgcctgggaatgttcagggccccagctcaggttccagcccacagcggaagcatgcagccagccagatcacagagtggccaaggtgctctctgtgtctcagaaagaaagtgggagaaactgggagaccctacacatataagcttctaaccaaactccccaattctactttatttttgactattttctaacctaaagagaagtcataagaattatgcagtgagcacccatagacacttcatctagattctctagttagcgatacgtttttaatccagttttcttaccactttaccttatctctccacgtatatttttaatttaaattttgtgtttgagttacttacagacacactttgagttacttgcagacaagctagaagaactagtttcttctgcaaaaccatggtgcaatgatcatatactggaaatttaacttcaatacaatacattcccctatacgcattgcctcatatacaatgcatttcataatccatattcagatttccccctaattgtaccaaagggtctcctatagctgttattagtttccattcaaaatccaaccaaggctctcacattgcatttggtttcgtgtcaattgtgacagccttgtgaaatttctttattatttgtttatttatttttgagacaagatctcattctttcaccaaagctggagtgcagtggcgcaatcacagctcactgcagcctctacctcctgggctcaagtgatcctcttgcctcagcctcctgagtagcttgaaccacaaaccacagccaccacacctggcttttttttgttgttttttgagagacgagaccttgctgtgttgcccatgctattcaaacaccaggactcaagttgagccattgtgcctggcctgaaatttctttgtgtgcacagggccctctcttccctgcagatcccaaagtgatttctggtagatatcttgcgtatattcagatgtaaaagaaagtttgtcattttgatgtgttaaagaacttggggggtcaaacagtcccagactgcccagtgagcattctctttcttccttcttgcaatgcagcaacaaagtcttgttttaaaattatatacctctggctgtctttttcccacaaggggagctgcagacagaagctgaaggagctgtgagtcatgcagtcaggatagggctctccaggcccccagggagggaggcaaaagtgaggagatgcatgttctctgcagttgccaagaacctggtggaccagggtaccgagaggcaagccctaagccacatgccagtcaaacacagcagagaggtggcccccagacctcatttctactaaagcagacattgcttagacatgatataatccttattgcctgactgtctttccacataaattatcctgaattttgtaatgacatgcaggagaatgccatatcaaatagactcttcttgatttgtatcggtcaaagtttgcagtaagaaatagtaagaaatatgttcttgagccaagcatggtggctcatgtctgtaatcccagcactttgggaggccgaggcgggtggatcacctgaggttgggagttcgagaccagcctggccaacgtggtgaaaccccatatctactaaaaacacaaaaattaagctgggcacagtggctcatgcctgtaatcccagcggctcacgcctgtaatcccagcactttgagaggtcgaggcaggcagatcacgaggtcaagagatcaagaccatcctggccaacatgatgaaaccccgtctctactaaaaatacaaaaattagctgagcatggcggcacacacctgtagtcccagctacttgggaggctgagccaggcgaattgcttgaaccagggaggcagaggttgcagtgagccgagattgtgccactgcactccagcctgggccacagagcaagactccgtctaaaaaaaaaaattagctgggcgtggtggtgggcacctattatcccagctacttgggaggctgaggcaggagaatcacttgaacccaggagatggaggtttcagtgagccaagattgtgccactgtactctagcctgggtgacagagtgaaactccatctcaaaaaagaaagaaagaaagaaagaaagaaagaaagaaagaaagaaagaaagaaagaaagaaagatgcttttgtttaagcagaaaaggacaccattgctgggtgcagtgactcagcctataatcccaatattacaggatccttgagtgtcacttcagcagccagaaacctctgtggccagtggcacctttgtccaagttttgctctggcctgtttgggctcattctgcccactcggcctggcaggctgtgctcagcttgcgctactggcttagatctcatacttgccaagggtgagccaggtgaggagcggcaaggggtgtgtgagcaagcatggggcccggccactgtgcacagccaggcacgccggttatggccaggcaggcagttctaggcacctgtacaggcaccagcttcctgcgaggctgtggctagaccaggcataccataagcaacttccacagctgacactgaggaacacagtggtgcctggaagcttggagacaccaggaaccacagagccataaagggggaggcacaaccctggctcagggagctcctaggtctgggttccccaaagggccacagctcttctctcctctctttttttctccttgtcacccataacatggcaagcaaggggtgtgtttcagccctgtttgtgttacagctctcttagccctgcaatttagcaggtcctgagttcttgtcctgtgtccgggaagaatgaagtactcagataagtgaagggtgagcaagatgaagaggagctttattgagcaatggaacagctcagaggagagccacggtgagtagctcctctccgtagccagggtgtcccagtgagtgttcagcccttaatagagagggtagctcctctctcctaggcaggtcgtcccgatgagtacttagcgctcagtagagagggtagctcccccgcagagaaggttgtcttgtcatttccctgctctcagcagagaggagaccttagagtgggtagctcctctccacagctggcagtcccgacatctcttctggtctggctaagtccagggtttttatgggcctcagaagggaggaagcacatgccaattggtccatgggcagccatgggtaggcccagaaaaagcaccacaagttcccattccagtccacaggaccagcagcccagcccccgggcttcaggccctccctagcttgaagttggggcttcactggggacccgtcgccttccaccctggggcctgtatgcctcctgctgccattcatgaagcctaggctgttcatgccaaagggtgcctgcagaccagcaccaagctgccctcagcccactgtcagcctccttcccatgctcatcagtgcccaagtccagagggggctgaggtggcagggggctggtatgtcagtgctgccctgagtgtgtgcacacctggctggtctgtgacagtgcccaggctcagccccatccttgcttcaagattgtagtgggtgccaggagcagggagaggccagatagtgggagcagacactcccagcatgtgggaggaaggggggccatcctggtccccaagagtgcagagatgcctgggtcctcagccacggcttgggcagctgcagctgcccccaggagggtagggctcctgcctgcttccagcccccaagagtacagggaggccagggtccctagctgtgacttgggctgctgcagctgtgcttgggagggtggggctcttctgcttctggctcctcccagtaccatggagcatggcactgccctgggtccagctccgcctaggagcccctttctgcccgtccctccgtgctctaccgtgctgctcccccactggcaggcaactcagcctggccccatcttggtggctcccagggtggccggctttggagggctcccaggggtgggctccaaggactgctcacctcctctctgtgttttccctgcagtggtggcaggtgaggtgcaggtggcagggcgaccctggccaaccccgcacaaatgaacctgatgctctcagggctggccctgaaagccccagctgtgcctttggctcggtgctcacgggctcccgggatgtggtggggagcgaggttgaagccacagcagaggctctgggcctgggagagcgtcctgcctggctatgtgagggtggggatgatgccattggctgcctctgagatggggcacaggggacccaccactgccactgctgctcctgcagccactcctgcctcctgccaccactgcctgtacctccctgctgcagctggcatgatggcagtggccactccggatgtcccactgctgccatcaacaacactttgggaggccaaggcaggaggagcacttgaggtcacgagtttgagaccagcctgggcaacacaacaagacttcatctctaaaataaataaatgaaaagacaaagaaaccacccaaattctaggaggccacagagtgagaacccctccagttacctccaccagaaaatgggcctgggaagcatgtttgcactgtctcctgcggtccctcccaggcacgcccatgtggtggatcctgatcatgtgttgtacccttgaggaaatggagtctgcgaaagtgaatttctggccttcccatcctgaagatgagagacccttgatgtggaacgttccccaaacagagggtggctgttcactaggtgctgggaggccactggagtgtgacagaggccctgtcggcagccaccaggaagcacaaccagaaacagaaactcagtgcatttcccttagtgttggtgtcagagtctaattttcaaaatgttaaaaacataatcctcataaaaacgagtagtgagcatggcatgaaaattgtgtttaactcattagtgagggaaccagcaggaagacatagacaagacaaaagacgatatgaggaaaagggaattttataatcagtaatgggaaacggaatactgagataatatttgctcatcagctggaaaatgttaatgctccaccacaatccttctcaaaccagagcacacaacagaagaagcttggggtgcctggctgcaccccgagtttgtgattttgtaggtccagagcggggcctgagaatccacattcccaagtgctgctgctggcccagcaccacgctctgagaatcatattctccagggaaatgcagctctggagtgggcttttctgctggtgacaaaggaaaatcactgcaccttattggttgtctgctcattaatctttaagtttagagagttgtaaatgtctgggttctaatcaggagtaaatggtaggctaggcagaggcatatccctcaaagctgtaatgtctagcaggaaattaaaaatcagtttaccttattttcaagctttggataagttttcttaacagtggtgctgatgacacaaatgtcttcttttttttctttgagacggagtcctgctctgtcacccaggctggagtgcaatggtgcaatcttggctcactgcaacctctgcctcctgggttcaagtgattctcctgcctcagcctcctgagtagctggaattacaggtgtgtgccaccacacctggctaattttggtatttttagtagagacggggtttcaccatgttggccaggaagctctcaaactcctgacgtcacgatctgcccacctcggcctcccaaagtgctgggattacaggcgtgagccactgtgcccagcccacaaatgtcttaatagattatttattttgcattaattcctccaaactgccaaagcagagattgccatatatcatgttgggtaatattttccactaagaagaaggaaaaaagagtagagaagaaaaataccattaccatccatgtgcatgactctttgtaggtttttgttgttgctgttgttgttgttgtttctgagacggagtttcactcttgcagcccaggctggagtgcagtggcgcaatctcggctcactgaaacctccgccacctgggttcaggcaattcttctgcctcagccttccgagcagttggaactacaggcgtgcgccaccacacccggctaatttttgtattttcagtagagacagagtttcaccattttaatcaggctagtctcaaactcttgacttcaggtgatctgcctgcctcggcctcccaaagtgtgtggattacaggcgtgagccactgcgcccggcctctttgtaggtgttaaagggcttttccacatctgatctcttgtgacccttgccataatcctgtgaggtgtgtgctttcatcccattcttgtggacaggtaaacggagcctctgggaactcaaatcacctccccaaggtgacagtggatacaagcatcagagggtatcgtccccacagaatgcaggagactacatcctgaagtcagtggaatgtgggctttggccacagtccttgtctcagtctcattcatcttcatcatttggttgttttgctcctaattcatctttacttaatgagagaaccttgcatattcactcaatgaaaggccctagcacacgagggcctgttgaaatagtttggctattagaattctcctctgtataaaagaaagcacagaagacataatttctaaaatagctaggaatatggaatacatgcctctaaggggacaaagtaaagcatcttgtgtcacgattaaagtcagaaagtggctggacatggcttcaggccctgtagtaattattaaaggctaatgcctgtaatcccagcactttgggaggctgaggagggcggatcacttaaggtcaggagttcgagactagcctggccaacatggcgaaaccccgtctctactaaaaatacaaaaattagccaggcatggtggtgcatggctgtaagtccagctattcaggaggctgaggcatgagaatagtttgaacccagtaagcagaggttgcagtgagccaagatcacgccactgcatccctgcttgggcaacagagcgagacttagtctcaaaattgcgccactgcaccccagcctgggtgacagagcaagacttaataaaaaaataaataaataaataaaagagcctaggtctgggaccagactgcctaggttccaattctgtctgcagtgcttacaggcatgtgactttgagcaagttgctgcctcagtttcctaatttgtaacatggggtaatgacaatatccacattatggggctgttataaagattaaatgagtttcaaagagtaaagaatttagggcagtctgggtgtggtggctcatgcctgtaatcccagcactttgggaggctgaggcgggtggatcacttgagcccaggagtttgagaccagcctgagcaagatggcgaaacccatctctacaaaaataaaaattaataaattagccaggcatggtggcatgcccctgtagtcccagctacttgggaggctgaggcaggagaacagcttgaacccagaggcagaggttgcagtgagccaacatcatgccactgcactccagcctagaccatagagtgagactctgcctccaaaaaacaaacaaacaaacaaaaagagaatttagggcaatctggcacatggtaacatgagtcatactgcagcaggaagagacacagacaaaacccctcagacaccgagttaaagaaggaaggggtttattcagccaggagcattgacaagactcctatctcaagagctgagctctctgagtgagcaattcctgtcccttttaagggctcacaactctaagggggtccgcgtgagagggtcgtgatcgattgagcaagcagggggtacgtgactgggggctgcatacaccggtaattagaatggaacagaacaggacaggggtcttcacagtgcttttttatgcaaataaccgattaggtcaggggtccatctgtaactaccaggcccacggtgtggcgccaggctgtctgcttgtggatttcatttttgcctttcagtttttacttcgtctttctttggaggcaaaaattgggcataagacaatatgaggggtggtctcctcccttaatacatttgtcccaatcatcacatgcaccacacgatgcagaagtccatggacacaagctgggaggaatcctatggacaccagcatcctcctcagcaccgtgacagcatggactgagcgagcactgtgtgccaggcatcatgtcgggtgtgcgagatgcagcattccacaggtcggggggcggtcattaaccccactttacagacgaggagatctggaccaggcaaatcagacaacctgtccaagctcatacaatgtcacatccccaacaccagttcttcccagtgtgcctgctgctctgccacacagtgggccagagatgggttctttctgattttcatacttcctgttaatgtcatatttgtctcataataaagataaactgcctatggaaggtaaccccaaaagcctcaggcaagacagggaggggagctgagtagctgcctcctaacccaggagtagggaaagcatctgtcaaggccaaacttggccaacttcacacttcccggggctctagcaccagagttgtccatactgggggctttggaggggccaagaagtcagatccccagaaatttccagcccccttctgccaggcattctcaatatgtgcttgacacttggctattcagacactgaaagtcttgctctgtgaggagcaagaaccagacagcacgccactccttggtgttttcaaggcaccagtggcctcagatgtgccaccagggtgagggggcagctcttactctcttctgccagggaaccacagaggtaaagccctacattgggtgccttgctctctggcatcaggatgcctgaggcccaagggtgatggcagctgaacagatgcatgctgtgtcatgagtttccagggtctacccagctcggggcggctttgtggtgcagaggagagaggagggagaggtctggccaccagtcttaggccagatgactcagctgatctccagaatggagatggagcacttggctttcatttctatcctccagatgtgccttgcaggtcacagatttttcctgttcacatgataaagggctctgttttccattctcccttggttgcaccctcctctgcacccagatggcaccccagcagattaaggagctggcaggacagtaagcagagccggccacagagtggaggggctcgcagagcatgcgggaggctctccctgcaggtgtctgtgttgcccaccagctaatcccagtgcatcttgaaatagatccagcaccctcgctgctgccatgctgggccaagccacctttatctgttacctagatgactactctaaaacctaacagatctccttccctttctcttcttcacttcagccacgtcctgtcccctccctgttcagaaccctgcaatgtcccctacctcactcagcatcaaagcaaagtccttaaaacaacccaggccgggtacggtggctcacacctgtgatcccagcactttgggaggccaaggcgggcggatcacctgaggtctggagttccagaccagcctgatcaacatggagaaaccccgtctccactaaatatacaaaattagccgggcgtggtggcacatgcctgtaatcccagctactccagaggctgaggcaggagaattgcttgaacccgggagggggaggttgcagtgagccaagatcgcgccattgcactccagcctgggcaagaagagtgaaactccatctgaaaaaaaaaaaaaaaacccaaacatctgtcaacagatgaatggatcagcaaaatgtggtatatccataaaacagaatatcattctgccataaaaaggaatgaagtactgatgcctgctacgacatggatgaacctcaaaaacatgatgctgagtgaaagaagccagacagaaggccacacattgtacaattccacgtatatgacatgtccagaataggaagtaaattagtagttgtcagggaccaggggaggagcaaaggggcagtcactgcttagtgggaacgacatttccttatggggtgatgaaagtgtctggatagaggtggtgactgcataacattatggatgcacttaatgtcactgaattgtacactttaaaatgcttaattttatattctgtgaatttcacctcaataaaaaaagttttaaagtattgcattaaaattataaaaagtggggcggggcgcggtggctcacgcttgtaatcccagcactttgtaaggccgaggtgggcagatcacgaggtcaggagttcgagaccagcctggccaacatggtgaaaccctgtctctactaaagatacaaaaaattagccaggcgtggtggcacacgcctgtaatcccagctactcaggatgctgaggcaggagaagcacctgaacccgggaggtggaggttgcagtgagccaagatcacaccattgcactccagactgggtgacagggtgagactctgtctcaaaaaaaaaaattataaaaagtggttaaaatgataaacatattatgttttgcatattttaccatacacacacacacacacacacacacacacacacacacacacacaacccaggcccttacaaccagccattcctccatggccatctcctccactgtcccctttctggtccactccagccacactcccactccttccagctcctccaaaacaccaggaacattcctgccccaggacctttgcacctgatgcctgtggtctggaaggctcttccctggatacagcatgctcccttgccaagttgctcaaaggtccctttctcggtgagctcttcttgaccatcctattaaacttgcaccacctccttattcagcattcaaattccctttaacctgctttctatttgtccacattaaattacttttatcatgtttgttttctctctccctttataggcaggtacctgcccctcagtaaatacttgtaactgcttcccctttaccccctcacatggttctctctgccctaggagctctcccggctttcatacatttatttcttcttatccatcacgaagtcctgatcattcctcccccagagaatatctacttcctttcctctccacatccattgccaggtccacagacagtgaccctgcctcctcctctggtcccctgaatccagagtcatcttttctcttgtggttttttttttttttgaggtagggtcttgctctgttgcccaggctggaatcagtggcctgatcgcagctcactgcagtctcaaactcccaggttccagtggtccttctacttcagcctcctaagaatctgggactacacaatgtgtgccaccatgcccagctaatctttttttttttttttttttggtagagttctagagatagggtcttgttatgttgcccaggctaatctcaaactcctggcctcaacgatcctcccgcctcggcctcccaaaccgctgggataacaggtgtgagccactgcccccagcatcatttcatttcacttagttaaatgttagatgttaatatttctgcttcctttttgaggaaggagttcagacagcaggattggtaaggggcggagcaaaagttctcccccagttcctggaattccaaagccctccaaagtggcaggctgaataatggttacggaaggaccacatcctaatccccaggacctgtggattacaggcgtgagccactgtgcctgtatgggagatgaccctggaccaaccaggtgggttcaatgtaatcacagggcctcataagaggggggcaggaggagcagcagcaggagacgtgacaacagaggggatgtagtgacgtgagaatagggcttggtcaggaacacaggtggccactggaagctgaaagacacaaggacacttgttctcccctcgagcctctggaaggaaccagctctgcccacaccctgacttttgtcctgtgaagcttatttcaggcttctgacttccagaaacattctcctgagatcaaatgtgttaagccactaagcttgtggtagtttgttacagcagccacaggaaacgatcacatgttccttctggaccagccagccaacagaaggccaggtgggaccccgcagagacactagccagatggactagccaccaaatgcaagggagcaagggcacccggcggttgttcaccaactctttgtcattttgtt[450 bp omitted]agggcattagatcaattgggttaacatcaatacaaacctttgatcccaaacctagagttgtagttttagataaatgtattttgcattcttagtctctagaggggaaatgctgttccctatctgcttcaggtgtaactgacaatgataataataatacttcttccccacaagttttaagtccaataaatgtaatactaattactattactgtgattggtaatgataatgagaaggaagcagaagacaggctaactatgtgccacatcccatgctgagcactttgcagatttttttttttaaacggagtctctctctgttgcccaggctggatggagtgcagtggcagtgatctcagctcactgcaagctccgcctcccgggttcacaccattctcctgcctcagcctcccaagtagctgggactacaggcacccgccaccacgctgggctaactttttgcatttttagtagagatggggtttcaccatgttagccaggatggtctcgatctcctgccctcatgatccacccaccccagcctcccaaagtgctgggattataggcgtaagccaccacgcccagccattttatttattttttattattattttttgtttgagatggagtctccctctgttatcaggctggactgcagtggcacgatttcggctcactgcaacctccgactcccggttcaagcaattatcctgcctcagcctcccaaatagctgtgattacaggcgcgcactaccatgcccagctaatttttgtatttttagtagagacagtgtttcaccacgttggccagtacggtctcagtcttttcacctcatgatccacctgtctcggcttcccaaagtgttgggattacaggcgtgagccaccgccccccgatctgcagatgttctttcatccattcctcagtaattaatgccacaaagtaggtactctgattatcccatgatgcagatgaagaaatcaagacctggagaggtccaatgcccaaaactgacaggtgcagtgctgggatttgtatgcaggagggcatgtccttactcctgtgaatacatctgtcctttgatgagggctacacttctggggaagtcaagcatttggtttagttgcacatcagtggcttccactgttggcccagatctgtagaaaggaatacattttctttttttttttttttgagacagagtttcactcttgttgcccaggctggagtgcaatggcatgatctcaactcaccacaagctctgccccccaaagttcaagcgattctcctgcctcagcctcccgagtagctggaattatagacatgcgccaccacacccggctaattttgtatttttagtggaggcagggtttctccatgttggtcaggctggtcgcgaactcctgacctcaggtgaaccgcccgcctcggcctcccaagctgggattacaggcgtgagccatcgtgcctggccaggaatacattttcttagcaacatggtacacacatacgtgcacacacgtgcacacatttacatgcacacatatacccacatacatacacgagtgtgccgctgtcccttgaaatctgttggaaattggttccaggacccctgcacatgcctaaatctgggaggctcaagtccctgatataaaatggcatagtatttgcatataactcatgcacatcctcctgtgtagttttgtttgtttgttttgttttgttttgtttttgatatggagtctcactctgtctgtcccccaagctggagtacagtggcacaatctcggctcactgcaacctctgcctcctgggttcaagcaattctcctgcctcagcctcccgagtagctgggactacaggctgctccaccatgcctggctaatttttgtatttttagtggagatggggtttcgtgatgttggccaggctggtctcgaattcctgacctaaggtgatttgcccgcctcggcttcccaaagtattgggattacaagtgtgagccaccatgcccggctttctcgtgtcctttaaatcatctctaggttacctacagtacctcatacagtgtaaatgatgtggaaatagttgttatactgtatttttatttgaattattttttattgttgaaatgttattttttattattgtcgttttcaaaggttttccatctgcccttggttgaatctgaggatgtggaactcatggataaagagggccgactgcatataactgaaataatgatgtcaccaagcaatgcttatgcctgctaggtataatactctctggtatcttctcctctatttcactaaaatttgtctctaaattcatttcctgactcattactgagtcctgacttgtggtttgaaaaacaggacctcaggacctgtgaggccctaggactgatgcagggtggcagggcgacctgagatccaggcccgaggcacccctgctcccagctcctgtcccactcagcccaagaactgtgtctaggcccacagctaaagccactccggcagctcctgcggccgtcccttccatgtgaccgatgcctgggctccaagcccgccctgcctgtcccgcccacctcagctaagctcccccactccccacatcccctactccctaggccatctggcctggatttcacaccccaattccaagtctctacatatgttagaatatagctttggccacgtgtaatagcaacacaaaacaagagagcttgaacaagacagatgcttatttcagagccgccttgggtataagaagtctggcgtcagggaggcagtgccagtgcccagaactcaggccgcctccatcatccctgcagtacggccaggtctgcatggtgtccctgcacactgccacctccagccacagccaccaggaagagagaagggggaagggcagggaaggtaccatcctgccccttaaaggatacgcacttaaaaggaacacaggatgcttgtgctcaaatcttcactggtcagaatttagtcacgtggcagcaaccagccacaagagacactgatagttacctggattttttttttagatgaggtcttgctctgtcacccaggctggagtgcagtggtacaatcacagctcactgcagcctcaatctccagggcttaagtcatcctcccacctcagcctcccaagtagctgggactgtaagtgtgcaacaccatgcctggctaatttttacaattttttgtagagatggggtcttgctattttgcccaggctggtgtcaaacttctggcctcaatcaatcctcctacctcggcctgtcaaagtgctgggattacaggtgtgagccaccatgcctggcctcattttcatctgtgagccacagcagtttgtggcaccccaggaccagggctctttaggactgagacctttgccttgcttttttttttttttgagacggagtccccctctgtcgcccaggctggagggcagtggcgcgatctcggctctcggctcaccgcaacctctgcctcccaggttcaagcaattgtcctgcctcagcctcctgagtagctgggattacaggtgtgcatcaccacgcctggctaatttttttttgtacttttaggagagacagggttacaccataatggccaggctggtcccaaactcctgaccttgtggtctgccctccttggccttccaaagtgctgggattacaggtgtgagccaccatgcccggcctgccttgctcttataagttcttatctaagaacttccatctgtggggtcaagcatgactcttttaaatactaatccaccatgccacttctgactaactcttgagtccaggaatgcctccaaaatgtggggttgacatattgctttttacgtagaaacacctagtcactgtaagattcacctttcttccaaaacaaccctggatgttgttgcatacatcataggctgtgatgcccatagccacctacacactccttccagagcactatgcttcttccccaagacataagacctggatctgggggattgcaacgtgaggatctacctgtcttgtggccacccaagaccacgcttctgtctataaatgcccctaataaatcaccctataccgacaactgaatgtctgccccattctttggttttttggctcctctggcatttgggggccactttgcacatacagcccttttggggaacagcctcctgcatgctggcccctgctggagcctggcctcccactgacaaccctttcacattgaccgctggagtagtttcctgtggctgccatagcaaatcaacacaaagttggtggcttaaaacaacaggacttcaacagatctttttcagagatatgaatctacccacaatagtctaccctctggttcccataaattcatgttcttcccacttgcaatgtatagtcaccctattccaacacccctaaaagtctgaacccattccattatcaactccagttacaaaatctcatctaaatactgccaaccccaaaagtcccaaatttctttctttctctctctttctttctctttctttctttcctccctccctccctcccagcttttctttctttccttccttccttccttccttccttccttccttccttctttcctccctccctccctccctctctctttctttctgatgaagtttcactcttgttgcccaggctggagtgcaatggtgcaatcttggctcaccacaacctctgcctcccagattcaagcgattctcctgcctcagcctcctaaatagctgggattacaggtatgcgccaccacacctggctaattctgtatttttaggagggatggggtttcaccattttctccacgttggtcaggctggtctcgaacttccgacctcaggtgatccacttgcctcggcctcccaaagtgctgggattacaggcgtgaggcaccgtgcccggccgatgcagttcttataaacagcaaagtcttgcttttgaattacgagtctgtagcctcttttctccgcaacattgagcctctgccaaccttgttaaaactcaaggattcttttgttataacactaagagttgaaggggagaatggatatgggctacagctagccttttctgccacaattccacttgtcacagacatgttagttcccatttgaaatttttctgcaccatacaaaatttaatcctcaggcccatgtggtctgtgggtgggtcttgttcagccccaacaaatgaaagaagattaattaacagaagcagctgcagctgggcctggaggcagtggctctacagcagcagtgagagccgagctgtggcagacacatgctcttcccctgactcacggctgcccagttccctccagcgaggctgctgacctatttttctattaggaacaaccagccaatgtgataatgaggaaaatgtattctggcccctatgaagtttagtgaagcccgaatgaagtggaggaggccacggagatgcacgaggaagagcattccaggcagagggaacagcgaggacaaaagcccccgggcaggaatgggtgtgcaagcctgagatccaacatggcggagagcaagccggaagtgctgcgcggggatcctaagggagcactgaacaggacaagctcagttttgtccctcaaacctccacaatcaggtaagtcagtcggcctcgcataagatatatgttttccccaccaatctccattctgaggagtggagtagaaactccctctcctctcatgaaatgttgagtatcagggagcaagtgtgtgctaaaaagggttacctcggtggaactaggttgctcaaatcctgaacattccgaaggaaggactggcccctgaccagctctggggagctaacttctgggtctttggaatatgcctgaggagagcacctttgtgacctgagacttcagccctgcctacaccttatgctaacagtgtggtttatggggaagacctgtttttatttgctgggagccctgggccatgctgtatctctttgacttctggatgggtggggaactgaggaataaattgctaaggccagtcatgtagatgctccatgcctatatgactgacctccaataaaaatcctggcaccaagacttgggtaagctttcctcattgacagtaattggtgtgtattattgtcacacgttgttgctgggaggactaagtgttgtccatgtgactccgcagagaactcctggaagttcaccccggtttctcctgaactctgccctattgtccctttttcctatgctgattttaatctgtattctttttatccccaagttctggcaagtctttgatgtattcttttcccataataaactgtaactgtgagcataacagtttttccaaattctgtgagccctcctagcgaatcatcaaacctgagagtggcctgggggaccacaaaacaaagttgaattcatcccatctatttttccatcatcttgctactctacctaggtgtcaaagccctagtaggaagagtctgattggctaacttgagtcacccagcccatcttggccaggggaggacaggcaccttgacaagcaggccccacacagctgcactgagtgggaaggaggatgcccaaaattacttgtatcaggaagagagagttggggccagtgtggtggcttacacctgtaatcccactgctttgagaggctgaggcaagagcattacttgagcccaggaggttgaggtggcagtgagctgtgatcactcttctactctccagcctgggtgacaagaccctgtctcaaaaaaagccaaaacaaaacaggagagttgggagctgggattctggtcaggtcaaatagttaatatatgcaccaggcagggaaatgggagtccacgttagcaggaaaaagttggagtcttctggagatactgaccaaaaagccatgtggtatctgggtttgtatccatccaactgttggcatcaagaaatcacaacagtcattggagagtgtcagctgcaggatgcaacagaatgtcaaagatccagagatttttgttgtgggttgaattatgtccactcctgccaaaatatgttaaagtcctaacctctggtacttatttgaaaatagagtctttgcagatgtaatgaggttaagatgaggtcatacgggattaggatgggccctaaatccaatggctgattcctcacaaagagagagatttgatgacaaacaggtgcacagaaagaagaccatgtaaagacggaggcagaggttggggtgattcaacccaaggaacaccaaggattgctggcagccagcagaatcaggaaggggcaacagtggattcttcatggagctgtcagagcataaccctgccaaaaccttgatttcaaacttctggccccaaggaccatgagagaatcaatttctgttgttttaagccaccaagcatgtggcaatttattatggaagccctaggaaaccttacagattttgccactggaaagggagtgctgcttctaaagatacgggttgaattgtccacgcggacggccagtgctgtagaaaaatgattgaaatgtccactcctgtatctaccaatcctttaaatttctttccctgaatagttatttcacaggtaggacgtttattagtaatttgatttagccaataagctgctttgccttatttatttgtgcttccaaatcctcctgttcatttaattttacttttccccatttccatatacggcacaacaaggagctatgctgtatgctctcctggctctgctttccagggaacagaagtagttataacaatttgaatttccccattgtaatcttaatgactcctatatgtacttgcactccttttaaatttaaacgagacctgcctagaagcaatcctaccatccctgctggcaagggtccacagacgcctgttagcactttttgcaggggttccccaggcagaaggctcacagcttttgtgcagcataaatctactgcggcactaccggctgtagcaggggacagacattgtacaggggtgagggaatggcctgagctggaaatgccctggtttagaacggggcccaggacaggcccctcatggcatttcccaaaatcacgttcccatctttatcaaacttagagtgacatttattagcccaatgttttccttttttacattttggacatatttcagactcagcagttttcttttttcctccatctggcagcctgactcgctgattctttctctatttttttaatatgaccatgcttcccatggttaaaacaagctccaggaaacacagtatttcctttacccactctcagttctgccatagcttgtgccaacaaagtagctttatgcagactacctccaatactgtcacaggccttaatataatcaactaaatgtgctttccctctaataggtcgcagagcggcttggcactcaggattggcattgttgaaagctagtaaccgcaacactatatcctgagcagccgaatctgcaatcacctttttaagagactcctgtaaccgaactataaaatctgcatatggttcttttggtccctattttatagcactaaaggaagggtattgttctcctcctgaagtgatttttcccatgctctaatgcacactcctctaagctgctctatggcatcatcctgcattaccacttatgcatctaaaccaacccagctgccgacccccaaaagttggtctgcagttatattaatttgaggttgggcctgggcgttgcaagcagcctgaatggaagcttcatctgcccaccaagttttaaatcgtaagaactgagcagagtcaggcaagctcgagtaaaagcatcccagtcagtagaaatcatcccactggagacagcaacattctttaactgtcacatcacaaaaggagaaactggtccatattgattactagcttgtttaaattatttaagtactttaaaaggaaaaggctcaaatgtagctataatattcccctgttgatcaggtgggtgtgttctaacagggaactgccaagcattcatatcaccctctcgtctagcttgctggattcctgcctgaatagaactgagagtggtcactcgaggcgctgctcgaatagtcacttgggcaactgcttttcgtccagtgtcctctggaaaagaaagatctgagggtcaggccactctttttcttcaaaataatgaggcggtgtagaggggtagggacaaacctctccctcctttgccgctttagctggcaagcaaacctgctctgtcacctcttctgttacttcgttatactctccttcttcctctgattcctcctccttgtcatctgtgtgaaaaggctccaaggtggaacgaaccagagcccacactgaccagacagttataggaatatcctcagcactatccttatatgcctttttcagtgagctgcctaccttctcccagacctctacattcatagttcctcagtccagaaaccaggggcaatatttctctactgcactaaaaagctgcataagttggctagtgctaaccttcactcctcctttctgagcagctgccgaagcagactcatataagcctcctgcctgctggacccttgtcccattgttacccggatgcttccgagctccccttactcaccacagggattgcttaagagtactcgggtgtcctccagtgtaggtccacattctccaaccgttgctccggcagcacttcgacccaggttcgagccccacatttgggcgccacttaccaaggccagctcggtcgtggagacctcaacccagcagtgctagaggaatgaagacaaagacacagaaatagagtgcaaagtggatcgggggctgacagccttcagagctgagagccacgaacagcgtttgacccacatatttattgacagcaagacagtgataaggattatttctatagattatagattagctaaaagcattccttatgggaaacaaagggacagactctggcttgttatctgcagcaggaacatattctgaaggcacagatcactcatgctattgtttgtggtttaggaacgccttgagtggttttctgccctgggtggaccaggtgttccttgccctcattccagtaaaccaacaacttccagcgtgagtgtcatagccatcacaagcatgtcacagtgctgcagagatttagtttatggccagtttctcatggcctgtttatggccagatttggggggcctgttcccagcaacatttttcacaggaatataaaaaatgatggtaaaattcatatggaaccagatcgggcacagtggctctcgcctgtaatcccagcactttgggaggccaaggcaggtggatcacctgaggtcaggagtttgagaccagccaggtcaacatggtgaaaccctgtctctactaaaaatacaaaaaattagtcaggcatggtggcaggtgcctgtagtcccagctgcttgggaggttgaggcaggcgaatctcttgaacccaggaggcggagtgcaaccattgcagtgagccaagattgtgccattgcactccagcctgggcaacaagagcgaaactccatcttgaaaaaaaaaaattcatatggaaacacaaaagacactgcatggtcaaaacaatcttgagcaacaaaaccaaagctggaggcatcacactagttggcttcaaaatatatcacaaagcttagtaatccaaatagcatggtagtggcataaaaacagacacatagaccaatggaacggattagaaagccgagaaataaattcatgcagttataaccagctgatttttggtgaaggtaccaagaacacacaatggagaaaggacatctcttcaacaaatggtgtggggaaaactggatgtccacaagcaaaagaataaaattagatctttatttcactccatatacaaaaatcaaaatggattaaagacttaaatatatctgaaactgtataactactagaagaaaacagaggggaaaagctccatgagctccactggtctgggcaataactttttggctatgaccccaaaaacataggcaacaaaagcaaaagatgtagatgagattacatgaaaatgaaacacttctgcacagcaaaggaaacaatcaactgagtgaagtgacaatctgtagaatggagaaaatattttcaaaccatacatctgataatgggttaatatccaaaatatataaagaacccaactcaatagcaagaaaacaacccaattaaaaaataggggaaggatatgaatagacacttcttaaagaagacatacaaacagccaatgggtaaacgaaaaaaaaattatcatcactaatcatggggaaaacgcaaattaaaatcacaatgagctatcacctcacacctgttagaatggctgttatcagaaagacaaggggtaacaggtgttgacaaggatgtggagaaaagggaaccattttcccttttgttggtgggaatgtgaattagtacagcattatggaaaacagtatggaggttcctcaaaaaactaaaaataaactaacatataatccagcaattccactactgggtatgaggcaggggaatagggtctggaggcagggaacctaaggctgattagcacagacttcctagagctgaatcaaaaggaaaatcccacctctccacaccaaagtaacagaaggatcagaggctactccgtttgcactactttgcagatgaaaaatggaaagtacctctgattggtcgcctcccacaaccaatcaaactggtcatgggcctaaccttcatatgcacaggggtgtaactttgttacttcacctcagcctctgattggtagccttccccagacaatcagactggtcgtgggccattccttcatttacatagggtgtaaccaggtaaccaatgggaaacctctagaaggtatttaaaccccagaaaattctgtaaccagtgctcttgagctgcttgctcaagcctgctcccaactctgtggagtgtactttcatttcaataaacctgtgccttcgttgcttcattctttcattgctttgtttgtgcgttttgacccagtcttgttcaaaacatcaagaacctggatgacttgtagtcaagaccctcgactggtaacactagtcctttttcacacgtttttttgcatatttcccccacccccgtgtggcttgccgaattattttcttaatagtttttgatgtgcagttttaatttagtaaagtttatcagaacttactttattattattttctaacctaagaaacttttgtctaccacccccacaccccgcttccaccaattcctgaaggcataatcctgttttcaccctcttatgtttaggtctatcgttcatcttgactgaattttgaattttgtatgagattaacgttcatttattaccccataatgacatatagtaattccagagccatgtattgaaaagacttattttttgagacggcatttcactcttgttgctcaggctggagtgcaatgctgcgatctcggctcatcgcaacctccaccttctggtttcaagtgattttcctgcctcagtctcctgagtagctgggattacaggcgcccaccaccacacctaagtaatttttgtatttttagtagagatggggtttcaccatgatggccaggctggtcgcaaactcctgacctcgtgatccacccgcctcggcctcccaaagtgctgggattacaggagtgagccaccgcacccagtattttttttctttttaaaattgagatggggttgcaaaggctggagtgcagtggctcgatcacagcttatggcagcctcaatctcccaggctcaagctatcctccaaccacagcagggactaccagtgcatgccaccatgcccagctaatttttgtacatattttttggtagaaacagggtctcactatgttgcccaggctggaatcaaactcctaggctcaagtgattctctcacctcagcctcccaaagtgctgggattagaggcatgagctgccatgcctggctgactttactttcttcattggattgctttgggcctttgtcaaaaattaaataatataaatatgatttatttattggctttctattctgttccattgatctgtttatccttttaccagtaccatactggcttgattactgtagttttacagtaagcccctttttttttttgagacagggtttcactctgtcatccaggcttgagtgcagtggtgtagtcaaagatcactgcaggcttgaccccccaggttcaagcaattctcctgcctcagcttcctgggtagctgtgactacggtcatgcaccaccacacccagctttttttttttcttctgtttgttgtagagatagggcctccctatgttccccaggctggtctcaaactcctggatgcaagtaatcctcccacctcggcctccctatgttccccaggctggtctcaaactcctggatgcaagtaatcctcccacctcagcctcccaaagtgctagaattacagtcatgagcctccatgcctggccttgacactctattttttcctaaagttctggttttcatctagtattctttccccttggctgaataatttcttttaggatttttgcagtgcaggtatactagtgatgaattcttttaatttttaaaagtataattttaattttttatagtataattttcaatttttaaaatctgtaaatctatttttctatttttgagatggagtctcactctgtcacccaggctggagtgcagtggggtgatctcagctactgcaacctctgccttctgggttcaagtgattctccttcctcagcctcctgaatagctgggactacaggtgtgcaccaccacacctggctaatttttgtatttttagtagagatggagtttcaccatgttggcgaggttagtattgaactcgtgacctcaggtgatcagcctgcctcagcctcccaaagtgctgggattacagatatgaaccaccacacccggcctgtacattcatttaatgttcattcttgaaaaatcttctggctgggtgcagtggcttacacctgtaatcccagcattttggggggccaaggcaggcggattgcccgaggtcaggagtttgagaccagtatgtccaacatggtccgaccctgtttctactaaaaatacaaaaaaaaattaacctggcgtggtggcatgctcctgtaatcccagctacttgggaggctgaggcaggggaattgcttgaactagggaggtggaggttgcagtgagccaaggttgcaccactgcactccagcctgagtgacagagcaagactccctctcaaaaaagaaaaagaaaaacaaatcttttttgttggaagtagaatctgggttagaatttttttcttttggcacttcaaagatgtttcagtgtcttccagccccctcgtttctgatgagaagttagcagccattccaggcttttccttctgttgtctggcactggtgggttcttggtctcattgacttcaagaatgaagccgtggacccttgcggtgagtgttacaatttttaaaaatggtgtgtccggagtttgttccttcttatgttccgacatgttcagagtttgttccttctggtgggttcgtggtgtcgctggcttcaggtgtgaagctacagaccttggcggtcagtgttacagctcctaaagctgcacatctggagttgttcgtccctcccggtgggttcctggtctcgctggtctcagaaatgaagctgcacaccttcacagggagtgttacaggtcacaaaggtagcacagacccaaagagtgagcagcagcaaaatttatggcaaagagggaaagaagaaggcttccacagcatggaagggaaccccagcaggtctgccgttgctggctcgggtggcctgcgtttattcccttatctggccccacccgcatcctgctgattggtccattttacagagagctgattagtccattttacagagagctgattggtccattttgacagagcactgattggtgcatttacaaacctttagttagacacagagcactgattggtgcatttacaatcctttagctagacacaaaaagttctccaagtcccctaccctattagctagacacagagtgctgattggtgtgtttacaaacctttagctagacacagagtgctgattggtgtatttacaaacctttagctagacacagagtgctgattggtgtatttacaaacctttagctagacacagagtgctgattggtacatttacaaacctttagctagacacaaaagttcttcaggtccccacccaacccagaagcccagccgacttcacctctcaatggcactcacctcaggactttgcagcacctagcccgtgcactccagcatcccagagggagcttgtcccccgatcaagcctagcaggtgccggccggccgcccgcggagcccacgcccaaccggaacccgcgccgtccagcgagtaccgctcgcggccccggctcccacctgtgcctctacctccacatctccccgccaacagagggagccggctccgcctcgaccagccccagagaggggcccccacagtgcagcggcaggctgaagggctcctcgaacgccgaggccgaggaggcgccgagagcgagggctgctagcgagttgtcacctctcacttccatgtgtgataaactgctttcctcttgctgctgttgggagacaattttccacgattctccgtttcctcacatctaggcattaacagcaaatttcctcagatatattacattccaggatagtaaaaataaaagaaggttttttttttttgagacaaggtctccctctgttgcccaggctagagtgcagtggcgccatctcggctcactgcaacctccgcctcctgggttcatgtgattctaccacctcagcctcctgagtagctgagattacaggcacatgccaccatagcctggctaatttttgtatttttaggagagatggattttcaccatattggtccggctggtcttgaactcccgacctcaggtgattcgtctgccttggcctcccaaagtgttgggatcacaggcatgaggcaccgtgcctggccagagtttccactcattctccgcagaaaggtccattcccgtaggtacttactctgccacacagaaccagaacctccatgagtctctgctagtggcgttcactgtttttttccttccttgtaatttatttatttttaaaaaactgggtgccttcgtcctgtaggggttccacctttgtgtattttgctgttgcatccccattatgtcattttattttaaaaatatttcaccatatttgcttcaggtttctctttttaaagaaaatcttatcaacagtcctgtgtttgttccttttgtgtgtttacagtgagtggatgttctataatgtatctatcagcctgctactaattgtttccatcttttgttcttgtaaacaatagcaggtgaaattgacctggaatctcttcctttgtgcaaactgtaaccaattacaaattgccctccaagaatgtatgctaatttaccctggcagggtccttcctccccaaagatttttgctatataattattttttaaagtatgtgtattcgtttccaaggactgccataacaaattaccacaaatggagtatcttgaaacaatataatctggccaggcgtggtgttgtgcacctgtaatcccagctactcgggaggccgaggcatgagaatcatgtgaacctgggaggtggaggttgcagtgagctgagatggcgccactgcattccagcctaggtgacagagtgaaactctgtctcaaaaaaaaaaaaaaaaaaaaaaaaaaaaaaaaaaaaaaagagagagagagagaaagaaaagaaaagacaatataaatctcagttctgaaaactggaagcctgaaatcgaagtgtcccagggttggtttctctccccagttctggaggctgccatgccccttggtgtccctggcttgtaggtagctctcaccctgtctctgcctccatcctcatatggcattctcctttgtctgtctctgtgtctctagggctgttttctcctccagcaagggctgttttcttattctatccaagctgtttctgctgagatggttggttggatcccagtgttgcaggtctcatctctccaacaagggtttggccaccacatctttggtggtttattttatttttaaaaattcctattttggctgggtgcagtgactcatgcctgtaatcccagcactttgggaggccgaggcaggcagattgcttgaggccaggagttcaagaccagcctgggcaacctgacgaaaccctgtctctacaaaaaacacaaaaactagccagaatatggtcgtctatacctgtagtcccagctacctgggaggctgaggtgggaggatctcttgagtatggggggttggaagctgcagtgagccaggattgtgccactgcactcccgtttgggtgacagagcgaaaccctgcctcaaaaaataaatatttcttatttatttgtgggagggaatcaatcagaagtactttccattgttcatcttcaaggcagtgcaaagggagtagcctttgatccttttgttactttgctgtggagagattttccttttgattcagttctaggaagtcagtgctaattgcctttaggttccttgcctccagaccctattctcgcgcctcactagtacccatcgtgtacttttaaagttcctgcaactcaataataaaaccccaataactaaatttaaaaatgggtaaaagattcccatgggtgaacctggaggatacgttatgtgaaaaacgtgaggtactgaaagataaatactgcatagtctcacttatgtgtggaatctaaaaaaggtcgaacttggccaggtgcagtggctcatgcctgtaatcctagcactttgggaggctgaggcaaggggatcacttgaggccaggagttagaaaccagcctggccaatatggcaaaacccccatctctactaaaaatgcaaaaattagccagtgtggtggcatgtgcctgtagtcccagttgctcaggaggctgaagtgggaggattgcttgagcctgggaggttgaggctgcagtgaacagagataatgccactacactcctgcctgggcgatagggtgagaccctgtctccaaaaaaaaaaaaaaaattgatgaaactcatagaagcagagtcagatatggttaccaggggctggagagatggggtgatgttgatcaaaggataccaaatttcagttagacagcaggaataagttcaagaggcctattgtaaaacatggtgactacagttaataacaatgtattgtattcttgataaaaaaataagtaaaagattagaacaggcactttgtgaagaagacacatatgagtagccaattaacccatgaaaatgttcaatattgttagtcatcagggaaatgtaaattaaaagtacatttcacatccatcacacaccattttataccctcaaaattgctaaaattaaaataacccacaaagtcaaatatttgtgaggatgtggaacaaccagagctctctcacacattactggtccaatcactttcggaaaaggcctgggagtttgtcttttcttcctcttctttttttttttttttttttttttttttttgagatggagtctcactctgtcacccaggctggagtggagtggtgtgatcttggttcactgcaacctaggcctgggagtttcttgtaaaactaaacatgcatctactctctgacccagtgtcccaccctttggtgtgcaccaagaggaatgaaatatattttcaccaaaagacttgtactataatgtacgtttctggtttactcacagtaatcccaaacaggaagcagccctagcagccatccataggaaaatgctcaactgtagtaaattcattcattggaacactactcagtaataaaaaggaatgagtcactgctacccacaacatagatgaatctcaaaagcattttgctgagtgacagaagccttaaaggaagcatgctctatggttccatttaaacaaagttctagaagaggctaaataaatccatgttggaaaaaaatcaggacagtgaattgctttgggagattgtcaatgaagactgaccagaaggggcatgaggacagtttctggggttatggtagtgttctgcaagaactccatgagccagtctctggtagcctctaatctgctttctgtcaaattcacagagacagaaaatcagattaggatacaaatctacaaattttgtagagttcttgccatttatctatttgttttctgtatgtcttatatggtttttggttcctcagttcctccattactgccttttttgtatttagttgattttttgtaatgtttcattttgatttctttcttctttccttttctgtctttttttagtaattgcctaagtggttgccttgtaaattacatatgacatcttaaacttgtaacaacctagtttgaaaaataccaccttagtttaagtagtacataaacactctcgtcctatgtccaacagtaaaagttaatggaagattatagcaacccaataaaaatgagatcactaaggcctcagatccttcaggaataaaattttaggttattcctccagatacagaacgctgatcagctgagagggtggctgagggcaaaggtagcaatgaaacagatagtgaaagaaggaagttataaatattaatgatggtctctgactagttatagtaaagaagactgtagtaaatatgcatactttagtctgtttgtatttgtatatatgaatcaatttcagttttatttctcttttctccagctattttacataaggaaagtgggtggtgattaacctcagagtctccagggacagactatccaggactgtgcctgaaatagaagaggaattaacatcatacagaactgaatacggtgactgaggggagtttgtgtctccccttttaggaaagaagatgagaataagtatgaaggagagtcatgtactgtacattaagcaaaagcatgatgctgttatttgaaatgttaattagaggtgcccactaaaaactgctcagcaattttcttggagacctcagtgctcatgttattctttcctctatcttatgttttcctctctcctgcccttttcagaaacagtctacagcagaagccattgaccctgttcaaattacagaagagccctttttgaatttatgaaaatcctgaaatattaaaatttattattttaatattaatatattaaattaatatattaatctacccgcctcggcctcccaaagtgctggtattacgggcatgagccaccgaacccagcctcatgttatgactttccaaccataatttagtgttaacaaagtaatcacaaaagtaatatattagtttgaaattagtaatgcccaccagattcaatcactaaaaaatgtgatatcattaaaaaccatttttctacatgttaacaagagccaacttctgtcccaagcaggttgaattatcacaatttcctgataagcagagtccagcttcctaattcaaactctcaaactcattgttaaataagcccagaggagttggacattttccatcacgcatgtgggaagaaagaaggccaacgatgctcttcagatttaacaagtaaaccttaaaagtatctgttaagaatacagagatgcccatgacaacactatcaccagagcaacaactatcaactaaggtaaccatgtagaaataatgtcctttttgtaggtcttcttttcttcctttttctttttcttcttttcctttttttttggtgcaagacatggcaacaatttctaaagtctatgtttacattatacttgcaagaaaaggcttattttaatcacagcacaagtgggtaactgttacagatattcacatgactctgcacttcccatttgacagcagagggcaggattgtggtggccgctctcaagttaccatcatcacaaatcagcttatttaaaacagtttattatgattataaataatctaaaatattttatttaaaatagattatttagaataaattattttaaatactttgtgatgtagaacattctctctggccgggtgtggtggttcatgcctataatcccagcactttgggaggccaagatgggaggattgcttgagcccaggagtttgagaccagcctaaacaacatagcgagactccgtctctactaaaaatacataaatgagctgggtgtagtagcttgcatctgtagccccagctactcaggaggctgaggtgggaggatcactcaagcccaggaggttgaggctgcagggctgtgatcgcaccactgcattccagcctgggtgacagaatgagactgtctcaaaaaaaaaaaaaaaaaaaaaaaaagggctaggcgtagtggctcacatctgtaatcccagcactttgggaggccgaggcaggcggatcacttgaggtcaggagttcaagaccagcctggccaacatgtgaaaccccgtctctaccaaaaaatacaaaaattagctgggcgtggtggcacgtgcctgtgatcccagatacttgggaggctgaggtgggaggattgcttaaactagaggcggaggttgcaatgagatgagatcacaccactgcactccagcctgggtaacagagtgagactgtctcaaaaataaaataaataagtaacatttttttctgaccttccctgttctttctgagacccccttgttaaattttaagacttgcagtttttgaggcctggttctgaagtgaactactcagcattacttgcaaaggacagacctgcaaagtgacgttttgctggcagaaatggagaaggagctgagtacagatttcatgtaataaaagtgaaatgaaaatgaagtgcacgtggaaatgttcttctctgaaacgaattagactatcctgtatttagctgttttggggaaaacattcaatattaatatctcttatgcttcttgaaaccacccccaccaccttcttcttctttttttttttttgagacagagtctgtcttttgtcacccaggctgggatacagtcgcatgatcgtggctcactgcaacctccacctcccaggttcacgtgattctcctgcctcagcctcccaagtagctgagattacaggcgtgtgccaccacacccagctaattttttttttttttttgagacagagtcttgctcttgttgcccaggctggagtgcagtggcgtgatcttggctcactgcaacctccgcctcccaggttcaagctattctcatgcctcagcatcctgagtagctgggattacaggtgcccgccaccacgcctggctaatttttgtacttttagtagagacggggtttcaccatgttggccaggctggtctcaaactcctgacccaggtgatccgcccgccttggcgtcccaaagtgctgggattacaggcttgagtcactgcatccagcctttttttttttttttttttgtatttttttagtagagacggggtttcaccatgttggccaggctggtttcgaactcctgacctcatgcaatctgcccgccttggcctctcaaagtgctggaagtacaggcatgagccactgcactcggccacccctttttcatctatgtttgtgtggtctttacaactgccccatgaagcaggcatcaatttccatttcacccacaagggactgcggctcagaggcccaaattcacacagttttagtggtggctgaggatgtgaagctggctttctgaggccttgataagcttcagcaataacaaggctgactgatacttattaagtagttactatgtaccaagacctgttctattgcgatacatagatccatccatccacccatccatccatccatatacagttgaccttgaacaatcggtgggcgggggtgggggggtgttaggaacaccaaccccctacacagttgaaaaactgcatataacattggattcccccaaagcttaactaccaacagcttactgttgatgggaagccttactgataacataaagttgattagcacatttttttaatgttatatatattctactctgtattcttaacaataaagtaagctagagaaaagaaaccattatttagaaaaccaggctgggcatgctggtgcacacctgtagtcccagctacttgggaagctgaagcaggatgatcgcttgagcccaggaggttgaggttgcagtgagccgagatcccgccactgcactccaacctgggtgacagagagagaccctatctcaaaaaaaaaaaaaaaaagaaagaaagaaagaaagaaaagaaaagaaaagaaaatcaggccgggtgcagtggcgcacacctgtaatcccagcactttgggaggccaaggcaggaggatcacttgagtccatgagtttgaaaccagcctgggcaacatagtgaattcctgtctctacaaaaaatacaaaaattagccaggagtagtggtgcacacctgtggtcccagatactctgaggccgaggtgggaggatcacttgagcctggaggtcaaggctgcagtgagctgagattgtgccactgcactccaccatgggtgacagagcaagacactgtctcagaaaaaaagagaaaataaaattataaggaagaaaatatatttagtgggtcgtcataaaagtcttcatcctcatcatcttcatgttgagtaggctaaggcagaagaggatgagggggagaaagaggaggagggagagggggaggaggggttggtgttggggtctcaggagtggtaaagaagtggtggaggagatggaaggggagacagaagaggcaggcacattttatttttttaaatccgtttataaatagactcatccagttcaaacctgtattgttcaaaggtcaactgtatgtataatttaaacctcataacaacccaatgaggtagttgagactggctctgtctgatgttgactcattagactcttcaacccagaacatatttacacttcaaaaagtaaaaaggaaggccagccgtggtggcttacatctgtaatcccagggctttgggaggccaagatgggaggattgcttgaggctaggaattcaacatcagcctgggcaacaatagcaagaccctgtcaccaccaaaaaaaaaaaagttagccaagcatagtggtgcgcacctgtagtgccagctactcgggaggctatggcggggggaacccttcaactcaggagtttgagtctgcagtgagctatgatcacaccactgcactccagcatgggtgacagagtgaaagcctgtctctcaaaataaaataaaataaaaacaaaaagctttcaatttctaaaaaccttgcattctgagacaggccatgaatatagaagcttccaggaagccttgaaatacaccaaaagcttagcatcttatataaaccatatcttgtttttaattaatcaaagacagaaatttctggtttttatcaaaagaagacaagcaacctccaatgacaattgatgacatctgtataataatttgaacaataagcaccaccttctctctctttttttttttttttttgagatggagtcttgctctgtccaggctggagtgtagtggcgtgatctcagctcactgcaaactccgcctcctgggttcatgccattctcctgcctcagcctcccaagtagctcgtactacaggcacctgccaccatgcccggctaattttgtttttgtatttttagtagagatgaggtttcaccatgttagccaggatggtctccatctcctgaccttgtgatctgcccatcttggcctcccaaagtgctgggactacaggcgtgagccaccacgcccggccaccaccttctctttttatccgtccgttgttagttggttttctgagagctagactcctttgtaatgaaacttgtacattagacttttctctttgggagtaccattctcattcccattatttcagaaactgggacacagagaagttcagtaacttgtctaatgatagggatagaagaggtcagagagaatgttcgagtctcatggtgttgcccaggctggagtgaagctgggatagggaaccaggcagcctgtccccataagccctgctctgacttgcccagccagtgcttgacttgtaagcaccagctttgctgaagttgttccctccgtatactttactagcccttactatttttttttttccttctagctctgtcctagctactgagaatacagatttattttaaaaatgcagtcactgttcacgggagtttaaacttttaaatgagggcatcagacaagtaaacaggcagtgataatagggcatggtagagccatgatagagggatgcaaaggactgtgagagcctggaggaagcacctcactcagccctaaaggtcagggaaggccacctacaggtgggacactggagcagtcttgaacatcagactgtctcaaaaagaaagaaaatcaagtatggggctgggcccagtggctgatgcctgtaatctcagctctttaggaggctaaggcaggcagactgctagagctcaggagttcaagaccaacatgggcaacatagcgaaactccatctctacaaaaataaaaataaaaataaaaattagccaggcgtggtggtgtgtggctatggtcccagctacttgggaagtggaacggggaggatgacttgagaccaggaggcagtggttgcaatgaaccatgactgtgccactgccactgcactctagcctgggcaactgtctccaaaaaaaaaaaaaagaaaagaaaggccaggtgcagtggctcatgcctgtaatcccagcactttgggaggttgaggcaggaggatcacttgaggccaggagtttgagaccagcctggccaacatggtaaaaccctgaatctactaaaaatacaaaaattagctgggcgtggtggcacatgcctgtagtcccagctactctggaagctgaggcatgagaatcacttgaacctgggaggcagaggttgcagtgagccatggctgcgccactgctctccagcctgggtgacaaagcaagactgtctcaaaaaataataaataaaaagaaagaaaagaaaagaagaataggataagttgggtggggaaggagagggccccattacaactgttaatcactccaaaacttagtggcttagcacgacgacattttgctttactttttcgtggttctggaaattggttggtatagttctctcaggatctctgatacagttgcagggagataggggctggtacttgattcatcttaaaggcttcactgaaatatctaccggttgacactagttgttggctgggccctcagctggggctgttgaccagaacactccatgttgcctcttcatgtagcccggacttcctgatagcacagcagctgggttccaacagcaagtctggggctacacttcctgggaacaaggaagaagctatctcacccggacttggaagtgacatggcctcactttcaccatagtcacaagccctcccagattgaagtggagaggttctacctctcaacagaagtgtcaaagtcaccttgcaggaaagaggatgtgggatgggagatatcactgtggccattttggaaaacaccatctgccacaaagacctgtaagggcctaagtactgaagagattacactcatcccaccacccaaatgtatttcaaatacaaacaactctagaccataaaataggggcaatgcagcccaataaagtatgaacttcctgtaactccttccatgctttttttgctggtggtggaagggacagggtgtcaaccatcaaatactgtagcgatatattcttttttttttttttttttttgagacggagtctcgttctgtcggccaggctggagtgcagtggcatgatctcggctcactgcaaactccgccttctgggttcatgccattctcctgcctcagcctcccaagtagctgggactacaggagccccccaccacacccggctaatttttttgtatatttttagtagagacggggtttcaccatgttagccaggatggtctcaatctcctgacctcatgatctgcccgcctcagcctcccaaagttctgggattacaggcttgagccaccacgcccagccatcaaatactgtagagatatattctttttcttcactctcttttttcttagggggttgcctctgctttgctggtgccctaagtgtgtgctcaaactatatggtggatgctccagcctggggtaagggtgttttgggcagagggaggagaacatgaaaataagttaaacagcaagattaggtacacttggatgggtagaaaccagagggagaatggtgagacacgatgctggaaggctgataagaaacagatcaggaagagccttgtgggccaatcataatactgagcatcaataacaatagcacgcattctgttgttcttagtattctaagcacttttcataagcacacatttaaccactcaacaaccctgagagataggtaatatgatggtttttttttttctgagacagtcttgctctgtcgcccagactggagtgcagtggcgtgatcttggctcactgctacctctcctgggttcaagccattctcctgtctcagcctcccaagtagctgggattacaggcgagcgccaccactcccggctaatttttttttttcagtagagacggagttttgccacattggccaggctgcgattatttcattttatggatgagttaaactggttaaatactttcttcaggctcacactgctagtaagaggcagaaatgtgatttgtgcccaggaagtctggccccagaacctgctcccttaactgcatattactaatcaaaggagtgtgcacttcagcctgaaggtgaaagtgagtgatttcctagaatatgaaatttgattaaaacaaaagtagagaatttcactaaaaccttctggcctgattttggataccttgggaaatacaaactcaagaatgaaatgttacatcctttttttaaggtatactatacatatgattgtaactcatgcctgtaatcccaacattttgggaggccgtggcgggaggatcacttgaggccaggagtttgagaccagcccggccaacatagtgaaaccctgtctccactaaaaatacaaaaattagccgggagtggtggctcacgcctgtagtcccagctactcaggaggctgacgcaggagaatcacttgaacccgggaggcagagatggcagtgagccgagatcgcaccactgcactccagcctgggcgacggagcgaaactccatctcaaaaaacaacaaaacatcaatcttaagagtacaaacttacgagttttatacatgtgcacacccatataatcattactcgaatatcacagacatgatgttgggtgaaagaagccagatgcaaagcgtaccccttcatgaagtccaggaactggtgatggaggtgctagaggacagaagagtggttatctggggctaggcatagtgactgggagaagggcatgagagagcctcggggtgtggaaaccggcttttcgggtctgcaagggtcgctgggaagtgtagtcttttgttgggggcggaatgagctgctaaaaggcagggtccttttacaccaacgttgatagagatcgatatttattcctgctacactgacaaaaaggaattgtacacgaagaaaaaaggcagacatttagagaagaggaattaacgggcaggttcataggagggctgctagaatctatcaatctcacactaccgtttcctttttctttttttttttctttttctttttggaccttgcgtcttttcgcgccaaagtcctagagacagagcctgattggcccagccacgacctgtgcccatccattggtggagacctcttgattaacaatctttcaaatttccggagcgaccgagggactgactgacagcctcgggagcttacgcgcatccctgaagcgggcgccagcaagtccttggggaaaacgctgcctgtacccaaaccataaccacgcgcttgtcccctgcgaagtgcttcccgaaagacccccaaggcaattttaaagttgcggacacctgaacctgctccagagctggctggaagcaggagctgcctccccaggatggggcagaatttgcatctctccactttcaatttaaggtgaacaaagcagaaaagcaagtaacttatcacgatcaaaatgcaacatctgattcccttacacctaccaggaggacagtgcctattccacacagagccagaaacctggagagaggaaacaaagaatgtaagtgaattctaggcagcaagcatttttccatccctcagctaagagccctgccaccacctgtccgtcttcagtaatacactggttgacactttttgagaccccaatatagcgctgagcactgcccaacctaaaaatgactattattttccagtcacttttttttttttttttttttttttttttggcagagtcttgctctgttgtccacgctggagtgcagtggcgtgatctcgggatctcggctcactgcaacctccacccccccgggttcaagcgattctcctgcctcagcctcccgagtagctgggatcacaaactcgcgccaccacgcctggctaatttttgtatttttagtagagacggggtttcaccatgttggtcaggctggtctcaaactcatgacgtcatgatccacccgcctgggcctcccaaagtgctaggattacaggcgtaagccactgcgtccggcctaattttttgtatttttagtagagacagagtttcactatgttggccaggctggtctcgaactcctcaggtgagccgtctgcctcggcctcccaaagtgctgggattacaagcctgagccactgcgccaggcccagagtcactttatagataaaaagccctataacttcaaagatcaatacctaaattacaaggggaaattaagtattcataaacagattaaaatatgctttaaagttccatgtaaccataacctttcttcaaaaggttattaatgcttaatctgtgccaaaaagtcacattgaatatacatagaatttatgttctttgtagcaagattcagggtggtttggataattaagacgaatatgtgagtaattgttcctgaaggctccatgtgtttggagctataagaatattccacattctgagaatgtggaaattactttcagtctgggaaaggaggcagggttagggaagccttcatgcaggaggtggtatgacaacatcatcacttcctcagtatttctgtattgcagtcaataaatgtctgtatgaaaagcacatagcaccgtggcaacaaactagatacagctcttgccctctagaaaaagggggaacatactccaccaaagatgaggtacagtgtgtgccaaacaatgtgcctatacttcctgctgaattacagttattttatttatttatttattttgagatggagttttgctcttgttgcctaggctggagtgcaatggcacgatctcggctcactgcaacctccgcctcccggattcaagtgatgctcctgcctcagcctcccaagtagctgggattacaggcatgtgccaccacgcccggctaattctgtatttttggtagagatggggtttctccatgttaggctggtctcgaactcccaacctcaggtgatctgcccacctcagccgcccaaagtgctgggattacaggtgtgagccaccgcgcccagcctacacttttttttggttgtggttttttttttttttttttttttttttcttggagacagagtctcgcgctgtcccaggctggagtgcagtggcgtcagctctgcaacctgcacctcctgggttcaagcaattatcctgcctcccagattcaagcagttctcctgcctcagcctcccgagtagctgggactacaggtgcacgctgccaagcccggcttattttttgtattttttagtggataccgggtttcactgtgttgcccaggctgttctcgaactcctgaggtcaggcaatctgcctgcctcggcctcccaaagtgctaggattacaggcgtgagacaccacgcccggctcagttattttttatttatttatttttttgagatggagtctcactctgtcgcccaggctggagtgcggtggcgcgatctcggctcactgcaggctctgcctgccggtttcacgccattctcctgccgcagcctcccgagtagctgggactacaggcgcccgccaccacgcccggctaattttttgtatttttagtagagacggggtttcaccgtgttagccaggatggtctccatctcctgacctcgtgatccgcccgccttggcctcccgaagtgctgggtcagttatttttaacctgtgtatttgacctcactcactagagccctgacaaaatggttgcttggggaaagctatttttggaaaacttctccaactataactcataaggtgtaaaactgtcacatttgtccagaacgtaatctaaggaaactgtcatacagttcccaaggacattttcctttaccagaggcccctttcaaggtacggctattggattactccagttgccacccttgtcttaaaggaaaaactcagctgaattaaatttagcagagtttatttgaacaagaacgattggcaaatcaggtagcctcagccagagtaggctcagggactccagtacagccatgtggtggaagaagatttacagacagaaaaaggaaagtgaggtatggaaaatggaagtgaggtacagaaacagcggattggttacagctcagcatttaccttacttgaacagagtttgaacagtaggccacctttgcattggccaaaatgcagtgactgacacaagagtaggctacagtctgcttacaacttcatttaggttatagttcacaatgtgcagagagacctttaggccaaacttaaaatacgtaaggaggcagctttaggctaaacttgatttaacacttgcaaatatacaaatatgttctggtaatgatttgcatgttttctcacagggtaaaaggcatttccgtgcagaaaagcaacagccttaggagtaagtaaaattcccttaaccaatcagtatataaaatgtggcccattctccaacatttacaatgtgttcatcatttgtagttacctgggttaataaaacagataaatgcagccagttgtgatggctcacgcctgtaatcccagcactttgggaggccaaggcaggcagatcacttgaggtcaggagtttgagaccaccctggccaacatggtgaaaccccatctctactaaaaatacaaaaattagctgggagtggtggtgcatgcctgtagccccaactagttggtaggctgaggcgggaggatagcttgaacccaggaagcagaggttgcagcgagccgagatcactccacttcactcctgcctgggcgatagagcaagaccctgtctcaaaacaagacaaaacacaacaaaataaaaacgcataaatggaataatcaaaactcaaggctgggcaaggtggcacacacctgtaatcccagcattttgggaggctgaggcaaaagatcacttgagcccaggagtttgagaccagaccaggcaacataatgagacccccatgtctacaaataatacaaaaaattagctgggcatggtggcatacacctgtggtcccagctacttgggaggctgaggtgggaggattgctcgagcccaggagtgagccatgatcatgccactgtgctccagcctaggcaacaagttaagaccctgtgtcttaaaaaaaaacaacaaaaataagccgggcgcggtggctcatgcctgtaatcccagcactttaggaggccgaggcgggtggatcacgagatcaggagatcaagaccatcctggctaacatggtgaaactccatctctactaaaaatacaaaaaaaaaaaaaattagccaggtgtagtggcgggcgcctgtagtcccagctacttgggaggctgaggcaggagaatgccgtgaacccaggaggtggaggttgcagtgagccaagattgtgccactgcactccagcctgggcgacagaacaagactctgtctcaaaaaaaaaaaaaaaaaatggtcgggcatggtggctcacgcctataatcccagcactttgggaggccaaggcgggcagatcacaaggtcaggagattgagaccatcctggctaacacagtgaaaccctgtctctactaaaaaatacaaaaaaattagctgggcttggtggcgggcgcctatagtcccagctactcgggaggctgaggcaggagaatggcgtgaacctgggagggggagcttgcagtgagccaagattgtgccactgcactccagcttgggggaagagcgagactccgtccccgcccccaaaaaaaaaacacccacacaaaagctcaactgggaaaattaactgaggcttttaaaattccttagccaaaagctcttccttccactggttctgcttcatctaggttgacccccttttggtaagcaccagctggggattttgaatctccattcaaaatcataatcgcagacctatgaaattatctccagaaaactgtacatctgtaacagtaaagggagacagatccagatattacaatggtcttatgaaacaattataaattacatattagtgaaagaatcttttcatagtgagctcctgggaaactaaaactgcaaggaccacagacttcaaccagcaggtttcgtctattggaaataacattaaaaacaaaactcggtggggcgcagtggctcatgcctgtaatcccagcactttgggaggccaaggcaggtggatcacctgaggtcggcagtttgagaccagcctgaccaacatgatgaaaccctgtctctactaaaaatacaaaattagctgggcatggtggtgcgtgcctgtaatcccagctactcgggaggctgaggcaggagaatcgcttgaacccgggaagcggaggttgcagtgagcctagatcacaccactgcgctccagcctgggtgacagagtgggactccgtcttaaaaataaattaattaattaattaaattaaatgaaaaacacaaacaagaaaactctcttcaatcaaaacggtatggaccttatcagttactccttagtagccctttgggatagtgacaggaggcagtcaaatgcctaggcagataggggtgggtccctggtgaaacccgacctttgaactgaagacagtgccacgtagatccttggataggatcgagaacctgtcttcccgtttggcatgctttcctctgattgatccccactcttcacctattttacatatacctaccctttcctaattgttttttttacactgccatgctcatcctttagtggtgtctttgctgtagcctttctttgatactcacaaaccaatcagtatctactcccctattctgaacccataaaagccctggactaagctagggggaaccaccccctgcatctcctctctgctgagaactattccatcactcaataaaattcttctccacccattctcacccttcaattgtcagcatatcctcattcttcttggatgcaggacaagagcttgggaactgccaaacatgggtacaagctatagcacaggcaggccgattgggtggggcacctccagtggctggcccagggccaagcaaggcccaggctagggggcgtcactgcctgtggaggtctccagttggcaaagtgactgagaaaaatcctgcatcatttgtgaacgcaaaatatctgagtcaggtctcagtcaatttaagaaagtttatttgccaaggttaaggatgagcctgtgacacagcctcaggaagtcctgagacgtgcccaaggtggtcaggggtatagtttgcttttatgcattatagggagacatgagaaatcaataacatatgtaagatgtacattgattccatccagtaggggaggataacttaaagtgggggcttccaggatagaagtagataagagacaaaaggttgcattcttttgagtccttgatcagccttccactgaatacacaatttagaatggctcagtgaatatgcattttcacataagcaatagggcagaggaagcaatcagatatgcatttgtctcaggggagcctcagagggatgactttgaatagaatgggaggcaggtttgccctaagcagttgccagcttgacttttccctttagcttagtgattctggcgtcccaagacttattttcctttcataccttataccacaaaattagaagacagagacccttggattcacgtctcagaaggctgagtcaactaaatgtggactatttcaccaggtgataccctaggatggttctttgggttatgcctgggcacaaggtgaaaaagttcataccctttttttttttttttttttgagacggagtctcgctctgtcacccaggctggagtgcagtggcgtgatcttggctaactgcaagctccgcctctcgggttcacgccattctcctgcctcagctacaggcgcctgccaccatgcctggctaattttttttgtatttttagtagagatggggtttcaccctattagccaggatggtctggatctcctgacctcgggatccacccgcctcagcctcccaaagtgctgggattacaggagtgagccaccgcgcccagcctaccctttcaaactgtcaacaaaaagagtcaaactctgtaaaatattttaagagatttattctaagtcgtatatgaatgaccaatgttccatgacagccccaggagatcctgagaacatatgcccaaggtgatcaggttttatacattttagggagacagaagacactaatcagtatatgtaagatgtacattggttcaaagtcggggcaacctgaagcgggggtggggctgggatgcttccaggtcataggcagattcaaagatttctggactggcaatctgttgagagttaagttattttctgaagacctaggctcaatagggaatgtgagggtttaagataagcagttgtggagaccaagattcccattgtgtagaggaaacctccaggtagcaggcttcagagagaatagattgtaaatgtttcttatcaaagtaattctctcctggatcaggaagaatgcccagaaaaggaaagagattctcttcagaatgtagattttacccacaagaggcagctttgcaggagtatttcaagatacggcaaagaagcataatttggggtaaaatactttgattttttttttttttctttgagacagagtctggctctgtcacccaggctggagtgcagtggctcaatctcggctcactgcaacttccccctcctgggttcaagtgattctcctgcctcagcttccgcagtagctgggattataggggcataccatcacacccagctaatttttgtatttttagtagagacagggtttcaccatgttgaactcctgacctcacgtgatctgcctgccacagcctctcaaagtgctgggattgcagatgtgagccaccatgcccggcaaaatacattgatttctttcagggcctgctatctgtcatgtgatgccatattagagtcaggctggaatttggcatcttattgctacagagagtccactttgtcagccttacgatctgttttaatgttaatgctggtcagctgggcctgaattccaaaagggaggagggtataatgaagcatgtctgaccctcccttcccatcatggcttgaactagtttttcaggttgaccttagaatgcccttggccaagaggagggatccattcagatggttgagtgtagggaccagccccacagggtcggtgggtttctccccgtgtgtggagacaagagtgtagaagtaaagacacaagacaaagagataaaagaaaagacagctgggcccaggggatcactaccaccaagtcgcggagactggtagtggccccaaatgccaggctgcactgatatttattggatacaagacaaaggggcaggataaggagagtgagccatctccaatgataggtaaggccacgtgggtcacctgtccactggacagggggcccttccctgcctggcagctgaggcagagagagagagagagaaaggagacaaagagagaaacaacttacaccattatcacagacttttagtactttcactaatttgctactgctatctagaaggcagagccaggtgtacaggatggaacatgaaggcagactaggagcatgaccactgaagcacagcatcgcagggagacggttaggcctccggacaactgcgggcaagcctgactaatgtcaggccctccacaagaggtggaggagtagagtcttctctaaactcccccggggaaagggagactccctttcccggtctgctaagtagcgggcgtttttccttgacacttacgctacctctagaccacggtccgcttggcaacgggcgtcttcccagatgctggtgttacctctagactaaggagccctctggtagccctgtctcggcatgacagaaggctcgcactcttgtcttctggtcactcctcactatgtcccctcagctcctatctctgtatggcctggtttttcctaggttatggttatagagcgaggattattataatattggaataaagagtaattgctacaaactaatgattaatgatattcatatataatcatatccaagatctatatctggtataactattcttgttttatatttcattatactggaacagctcctgtcctcggtctcttgcctcagcacctgggtggcttgccacccacagttgaagggcttagaattttatttttggtttacaaaactcacagatctccctcatttacaatcttgttggattccttctgtattccattggcattgaggactaagctctgatttttttcttatcttgcccaaatttctatttaaggggtctggggagtcatgccctacaaaccataaattctcaccagatgggttttatttaaccctatatattgtcacttactttccaacctgactccggcataacattatgagacaaaataaaatcaaaatattttaccccaaaacatgtttctttgccacatcttaaaatggccctgcaaaactgtcctttgtcggggaaaatttgcatttgtaaagaatctctattaacatagctagatctttttcttccaggccctcccaatctaaaagagattaagagtctagcaccttttaaaggcctgaataggaaacatttgtcatctgttgtctcacagggcagctactataagactttaaaagaaccttggtctccacagtcttttatcttaacctgaacatttcctttctatgatcccaggtctttcgacaaactcaaccaattgtcaaccagaaaatgtttaaattatctatagcctggaaactctagctttgagttgtcccacctttctgggccaaaccaatgtatttgttaaatgtatttgattgatgtctcatgcctccctaaaatgtataaaaccaagctgcaccctgaccaccttgggcacgtggtctcaggacctcctgagttacaggccatggtcactcatatttggctctaataaatctcttcaaatatttttacagagcttgactctttttgttgaccatatgatcatttagcttctatctttgtaccacaactgggtactaaagatgttatttggcatgtagaggccctaagcaattatacacagaaggtcctaaatatatctacatggttatctcattattgaataataaagttactctcatgaaaaaagctgtattgcaaaaccatatggctttagctatactcaccatggcccaagaagaaatggttgtaaaccaaaaacaaaatcctaagcacccccaactgaattaatggccaaggggaccctagagaaacctgaaaaactgaactcctgcccatgatgggaagggaggtcagacatgccttatcatacctcctcccctttggagtttaggcaccactgaccaacgttaacattaaaatagagatcataagtctgacaaaacagactctttatggcaaaaagataccaaattccaacctgattctgatagagcatcacatgacagatagcagacccttaaggaaatcaaaatattttactgcaaaatatacttctttaacatgttttaaaatggccctgcaaagccatcttttgtggtagaaatttctatctgtagagaatctccattaatgcagccagggcttccctttccaggcatttcccagacataggagagattaactgagtgtctgccatcttttaagacctgaaaagagacatttatcatctattctctctaaaggctgctacctgtgaggcttcatctacgtaacaaagaccttggcctccacaatcccccttttctggattaaagcatttctttctactgacttcaagtctttaggcaaagcttaactctttcaagcagttgccaataagaaaatctttgaatctacctacaacctggaagcccatgcccctttaagatgtcctgccattgccgggtgcaatggctcactcctgtaatcccagcactttgggagcctgaggcgggcagatcacgaggtcaggagatcaagaccatcttggctaccacggtgaaaccccagctctactaaatatacaaaaaaaattagctgggcgtggtggcaggcgcctgtaatcccagctcctcgggaggctgaggcaggagaatggtgtgaacccggcaggtggagcttgcagttagccgagatcgcgccactgcactccagcctgggcgacagagcgagacttcgtctcaaaaagaaaaaaaaaaaaagatgtcctgccattttgatctgacccaaagtataccttccatgtattgatttatgtctttgcttatggctcctgtctctctaaaatgtataaaaccaaactgtaattcaactaccttgggcatactttctcaagacctcttgagactgttccctgggccaaggtcattcacattggctcagaataaacctctttaaattgtttacagagttttgtttttccattaatgctgtgttattgtaaaactaaatgctgtgtctatatcccagataaatcaaataatatcactaaggtaatggctaatatgaaaacccaaataaccaatctttcatatccaaaacgttctctaagcaactggctaaatagctggtttggctcttgggaaacttggtggtaaagtcatgacttattctagaaattataaacatttgttgtgttctgtcttgtttttgtctaagttgctgttataacatttgtttacaactgagtcagtgtggcttggcacagagtttcacacctgtaattccagcactttgggaagctgaggtgggtggatcacttgaggccaggagttcaagaccaacctggccaacgtgacgaaatcccgtctctactaaaaatacaaaaattagcctggcgtggcacacacctgtaattccagctactcgggaggctgaggcaggagaatcacttaaacccaagaggcagaggtttcactgagccaagatcatgtcactgcactccagcctaggcaacagagcaagactctgtctcaaaaacaaaacaaaacaaaacaaaaacaaaaaaaagaaaccagctgggcgtggtggctcacacctataatcccagcacttcgggaggccaaggcggacagatcgcctgaggtcaggagtttgagagcagcctggccaacatggggaaaccccgcctctactaaaaatacaaaaataagctgggcgtggtgatgtgtgcctgaaatcccacctgctcgggaggctgaggcaggagaatcacccgaaactgggaggcagaggttgcagtgagccgtgatcacgccactgcactccagcaggcgagactctgtctcgaaaaatataaataaataaataattgagtcagcgtgactcaaaagactaaaataatgatcacttgaataaatcacattaattaaaaatgtaaccaagtaacctggctcaggtcacaaagtcacttccttcatgttttttttaaatttggcctatactggccgggcacggtggctcacgcctgtaatcccagcactttgggaggccgaggcgggcagatcacaagatcaggagatcgagaccatcctggctaacacggtgaaacccgtctctactaaaaatacaaaaattagccgggcatggtggtggcaggcgcctgtagtcccagctactcgggagcctgaggcaggagaatggcatgaacccaggaggcgaagcttgcagtgagccgagattgtgccactgcattccagcctgggcgacagagcgagactccgtctcaaaaaaaaaaaaatttggcctatacttcatgagtcttatagttcatccaattccactttcaccataagacatggtatcttaggaatgaatcttcctagtgacatgggactaaactcctggacataaaaagagtctgagaaatcccagctacttgagaggctgaagcaggaggatcacttgagcctaggagtttaaggctgcagtgagctgtgattgagccactgcactgtggcctgggtaagagtaagaccctgtctctaaaataaataaataaataaataaataaatatttttaaaaaattaaaaaggagttaaaactattgagttcatctacaatgctttcttcaaaagatcttgatgaaaaggggaaaatgtgaaaataaaacgtaaaagctgttggaacacccaaaaaacacgttaagactcgagagagatgtgactgtgatttgagtcacatgtggttacaatgtctgctctcagattatagattaactcactttcttagttttcttgtcctgtacaatgactagagagaactaaaggacattagggacaaaaccctcctgccttcttttttttcttttttctttttttttgagacggagttttgcccttgttgcccagctggagtgcagtggcgtgatcttggctcactgcaacctctgcttcctgggttcaagcgattctcttgcctcagcctcccaaatcgctgggattacaggcatgcgccaccacaccggctaattttgtatttttagtagagacggggtttctccatgttggtcaggctggtctcgaactcccgatctcaggtgatctgcctgctttggcctcccaaagtactgggattacaggcgtgagccaccatgtctggccttgccttcttaattaatgacccttgttaaatattaacttcctggccaggtgcagtggctcacacctgtaatcccagcaatttggaaggctgaggcaggcagatcacctgagcccagggtttcaagaccagcatgggcaacatggcaaaaccctgtctctacaaaaaacacaaaaattagctgggcattgtggcatgtgcctgtagccccagctactcaggaggctgagacaggaggatcacttgagcacaggaggcaggggctgcagtgagccgagatcatgctattgcactgtagcctgggtgacagagcaaaaccctgtctcaaaaaaaaaaaaaaaaacaaaaaaaaccctgtctcaaaaaaaaaacaaacttctcttttttgtcctgctgtgcttagactagatgacagaaacctcatgattattagaccctctgcaaaaaaaaaaaaaaaaatgttaaatgtacccttcccaaaagaagtactacctataattaatcaatttgctgtaaccgtgtgctatccttgtatgaataatgttgtaatcttgcaaaactcctctgtctctgcctatacaaatgaaatcgctaaacgtccctattttgaaacgctgacctcattcctttggagttggtgttggtagcctagccttacactttgtgactgaataaactctctttaaattagattctgacccttttgattattttacattgatggagtttacaaagtataatgcacattgttaattttttctcagttacttaaattttattcacatggttcaaaagcattaagttaatacattaaaataacaataaataaaaagtaaagaattcacttagtgacctgttccctcattcttatccccccatcccagtttccatgtcccatcctttgtgtggtttctgagcctagctccttatggatctgtgttttgattgggctgcaaatattcactcctgtcacctctccccattgtggtagagttcacttctctttttggctgactttgggctttgccatatgtagtgtacttcgtttgggcacaagtgaaagtgtgtcatatccaagcagaggctttaggaggactgataagttccccctagacctcttgcactcttgccatctgccatgacaaggacttgccccaggtagcctctgtaccttcagactgggtcccaaaatgagagacatgtggagcacatgtgaacctaatcggcagcccaaaccacctgacctacagatctctgagcaagaaaatgttggtcgcaaaccaattttaacaatggtggggggcaaaccaattttaacaatggtgggggcagtatttgttaattttttttttttttttttttttttttgagacggagtctccctctcgcccaggctggagtgcagtggcgcgatctcggctcactgcaagctccgcctcccaagttcacgccattctcctgcctcggcctcccgagtagctgggactacaggcacccgctaccatgcccggctaatttttttgtatttttagtagagacggggtttcatcatgttagccaggatggtctcgatctcctgaccttgtgatccgcccacctcggcctcccaaagtgctgggattacaggcgtgagccaccgcgcccagccaatatttgttaatattatcacagtaaaatcaagtctcactttgcttttttaaactttatatatgtcactaagatatgtagtgacttctcctgttggtgcatagagttacttctttgagtttcatggtattacagtgtgtggctatactccgatggatttaaccaggcttccattaatggatatttgagttggttcaatcttttgctatcaaaaataaggatgtattacatagtcttgtacatacatcattttgcatatgtattcgtcagggttctctagagagacaggactaataggatagatgtgtatatgaaagggagtttattaaggagtattgactcacaggatcacaaggtgaagtcccacaataggccatctgcaaactgaggaacaaggaaaccagcccaagtcctaaaacctcaaaaacagggaagccgacagtacagccttcagtctgtggccagaggcccaaaaacccctggcaaaccactggtgtaggtccaagagtccaaaagctgaagaacttggagtccgttgttcgagggcaggaaacatccagcacagcagaaagatgaaagctggaagactcagccagtctagtcctcctgtgttcctctgcctgcttttatcctagctgtactggcagctaattagatggtgcccatccagattgagggtggatctgcctctcttagtccactgaatcaaatgttaatctcctttgacaacaccctgatggacacacccaggaacaatacttggcatccttgaatccaatcaagttgacactcagtattaaccatcacagcacatatgtaaatatatctatagaatcatggaagtgctcagatgggggcatacatgaaatttgaaatattgaaagatgttcctcaattgccctacttagggattgtgcttagaacaatgacactgatcatcagttaatgctggattaaatgaagaaaacgctttagtatttctgtcacttgcattcctgttctcatcctcttctctgaggatcatcttctacatcttctcttcctctttctgtgccctaagtgatcaccaaggatctgtccttgaccttgtatcagtcagtataggttaggttatgctgtgtgaaaaatgactgccctcccatctcagtggcttacaacgacaacagttcatttcttgctcatgttacgtgtccatcgtgggcctgctacagtactacacatcacttttttcactccaggacccagtctgttggaaaagtctctgtttgggacattgatggtcttagggcagaaagaagagaaagagacatggtaaatcacacacagtttctgctcagaggtgacccatgtcacttctgcttacatgtggctgattatgcaagtctcgtggctgctcctgggttctactgagcaggaatgtgtttaatccagatgtgggggtgccacatctgggtaaacaaaaattcaacctaccacagtcctattctcttcttactccacggtgtagatgtggggcccacacccattccttagggaaatctcatgtacccctgtggtctctgctccgtcttcaggcctaacaaactcatagagccaagcttgctgagctgccctattaagctctcttgccagaatgtcaaacccaacatatccaaaaaggagttcatcccatttccccctaaacctgctgcttctgtgagatcttcatcaccctgcatcctccctaagtccttgctgctcttcccccttcccttggcttccagtccactgccaagcagatgctgtttagcatcttttcagcactttttgagcctggataatttaattctttcctgggagaaatcttaagatcaaagcttatttggaggctgggtgctgtagcttatacctgtaatcccagcactttgggaagccgaagtggatggattgcttgagcccaagagttcaagaccagtctgggccacatggtgagaccccgtctctacaaaaaaaaaaaaaaagtacaaaaattagccaggcttcctggtgcactctgtagtcccaccaacacagaagtcagaggtaggagaattgcttgggtccagaaggtcaaggctgcagtgagcctgtgattgggtcactgtactccagcctgggtgacagagagggaccctgttcccaaaaaacaaaaaaacaacacacacacacacacacaccttatttggctcagaggcagattttcccggcctcaaggagggatgtggtcacctctggaatacaaagatgcttagaaacccatagcctcttgtgtgggtacatccatgctaaaggaatagagaaacactgaactgaacaactcctgaaatgtcctgtgttagcatcacggtgttaacggtgaggggttaaggagctgcttccctaagggactggaacagatggaagaaacccacctcatgaccagtaggccatgcacgattctaggaggagcttaaatggcagggtaggtggtagcttatgcaccccagtattcttcctggcaggaaggcgggaaagggacagtgaaggtcagtcacttgcctcgggaacatcaatacagatgcctgctgggaaacggagagaatggggctggaagggccaggacaagatgactcctgggagacacgtccaggccccaccgcctgctggaggagggacgctggtaggagtgggccaggcagtggtccccacttcgtattcaaaaaggccctagagtttaggctttggaccttactgctgtatgaggccgcagcgtcagagaagacagtgatgagaaaaacgtcacttgcactccctccagcatcactgcacagcttctgaggcactaccaattagtagatttttccatgaattgtgaaactgtcttataaaaatcacaaatgcatgacatcttatatttgcatgttaaaatcgttttattaaattgactgctttaaaaatatttcataattatcataatctcattttggctctttcttcccccctttcatttattaaatgtgttcaccaaaaagtggaagctctgaagttgaatatacatgagaaaagcaaataaaactgtctctcatcaagccaggatgaagatgtggtaacctgttaaactgacaggctgattcgaacaaaacccagacagctcctggtgagcatgaaatagaattggtttcttatttgggatgccaaggtgggtggattacctgaggtaaggagttcgagaccagcccagccaacatggtgaaaccccatctctagtaaacatagaaaaattagcagagcatggtggcatatgcctgtaatcccagctactcaggaggctgaggcaggagaatcacttgaatcttgaactcaggaggcagaagttgcagtgagctgagatcatgccactgcaccccagcctgggcaacagaggaagacctggttccttaggagggaggtctcctacacattctgcacaatctctgagggaagatgtgtgtgtgtgtgtgtgtgtgtgtgtgtgtgtgtgtgtgtgtgtgtatgtgtgtgtgtcagtggggaggcgggttcatgggactccactgtcagagaatttcctccctggactagaaccgagccagccatgtcattgtactgcagagctgcacccactaaccccactcctgtctgggaaatccagacagtgtaactgtttgcaagggtgctctggagccagactctccaggttcaatgccagtgtctgaggttttttcccatttgacatcagctcatagtctgacacagagatgtcttcaacaggagtagaactatttagtagaaataattgagtgcagaagggctgtttttttaaggtaaatgtggcttctctgcgacccatatgcatggtggaaatgctctacatctgtaacgaacattggacatttgctgtattggtcactgtgttgaacacctgaaatgtggctagtgggactgaagaactgaattttaaactttactgaatttaaacataaacagccacatgtacctagtagccaccacatgggacagcaatggtctagctcccaagtgccaacagcttcctgtggaaaaatcaattttattaaaatatgtgtcctaccctgcactcagcctttctggatgtccctcttcaatataatatctgattaaggatttgaagaaaatacagtatagatattgtttgtagaatagacgtaagaccctaaaatacagttttatacaaaatttgataaatcctggccgggcgcaatggctcctgcttgtaatcctagctctttgggaggccaaggcaggcggatcgcttgaggtcaggagttggaaaccagccttgccaacatggtgaaaccccgtctctactaaaaatacaaaacaattagacaggcctgttggtgggcccctgtaatcccagctactcgggaggctgagttagaaaaaccacttgaacccgggaggcggagcttgccgtgagccgagattgcgccactgcactccagcctgggtgacagagcatgatgattccgtctcaaaaaataaataaataaaaattataaatcctttctctaagagaagaaatatggctttcttatttctttttcttttctttccttttttttttctttctcttctttttctgagacagggccttgccctgtcacccaggctggagtgcagtggcgtgatctcgactcactgcaacctctgcctccctgcttggaacgattctcctaccttagtttcccgagttgctgggaccacaggcacgtgccaccacgcctggctaattttcgtagttttagtagagacggggtttcaccatgttgctcaggctggtcttgaactcctgggctcaagcgatccgcctgtcgcctgcctcggcttcccaaagtgttgggattacaggctgagccaccacgcccggtctgggctttcttatctctgagagtcacaatttctgtgaggcagccaccaacactagcttttaagtttcagggagttgcagtgaaactttctttcctgccaggaagctgacattttccagaaaccgcaaataacagaacattttgtctctgtgtcagcttcatgcaccctagtcttaaaccaacaatgttcttaaaaatgcattgtttttcttctcttatcgcttctcggttgttctaataatttgatagcttcagtacaccattaatgttcaccttacacctcccggaggaggagatggcgtgatactcgcaaacacgggactacaaactattgattccattccgcgtgcttcaggaaggtggcgctgtttccgtgcagctcatcaggtacctcagaaaaagaaatttggtggagacgtttccgcagcctccaagcagcatcattcaaaggacaggtcagcaggaaacagattttattttaaaattcccagcagcgggagggacggggggggggcgggggagggacttgttagagttcctgtcgctaaaggaaattcttcctagagctatactaaacttagttattactgagacagttttttctggcttcatcagaggaaaaatatagttatgcatcccagtatttttgcaacaattccaccaccaacagcaataaaaacggctgcaatttattgagtactatcttctgtggcactttacaagtgttatcatctttggcttcacaatttctttactatcttaaggatgagaggctaaggttttggggtgttaagaaattcaacatctgtctagctgttctattaggtgtgtagtgatacctccccatggtcttgatttgtatttccctaatggctagtaatgttgatcatctttctatgtgcttatttgccggttgtatattctcttcaatgaagtgtttcttcatgttcatgtctttgtccattttttaaattgaattgctcaattttttcacgttgagttttgagaggttttttttaatttaaaaaaatagaaacaggatctcactatgttgcccaggctggtctcaaactcctgggctcaagcaattctcccaccttggcctcccaaagtgttagcattacaagtgtgagccactcagtgcctggctgagaattctttgtatattctagatatgagtcctttttcagatatatagtttgcatatatattcttccagtgtgtagtttgccttttgattccattaacagtcttttgcagagcaaaacatttttaattttgatcaagtccactttatgaatttttttcttttatgaatcatactttcagtgtcattttgaagaaatctctaccaactaggtggagaactagggttcccccacattttctcctgtactatcttctaaaatttttatgctttatgtttaaatctattattcattttgagttaattttcataaatggtgtgaggtttaggtcaagtttctttatttttatttttaaatttttgcctattaacattcaattgctccagcaccatttattgaaaaagcctatcatctcattgaattgttttgaatctttcttaaaaaatcagatggacatacttgtgtggggctatttctgggtcctctattttttcccattgacctatgtattcatccttcgataataccaaacaatcttgagctatgtaattagatttgaagctgggtgcggttgctctcgtctgtaatcccagaactttgggagcccacagtgggaggattgcttgagcccaggagttcgagaccagcctggtcaacatagcaagaccctgtctctacaaaacatacagaaaaagttagccatgcggggtgacatgcacctgtagtcccagctacctgggaggctgaagtgggagggtcacctgagcctgggaggttgatgctgcaatgagctgtgtttgcaccactgcactccagcctggacagcaaagtaagaccctgtctcaaaaaaataataataaaaattgaaatcaggtagttccattttattattgttttccaaaattgttttagctatttattctatttattctagttcctttgcctttccacatacattaaaaaaaaaaatcttttctacatcttcaaaaaattttgctggcattttgataggaattttgttaaacctgtatatcaattaaaggagtattgacatcattactacgttgagtcttcagtccatgagcttgaaatgtctctttctttagatctttaatttcctttcttttttgagacagggtctcactctgtcgcccaggctagagtgcagtggtgtgattttggctcactacaacctttgcctcccagactcaagtgatcctcccacgtcagcctcccaagtagctgggactacaggctaccatgcccagttaattttttgtatttttttttttgtagagatggggtcttgcccaggctgtgttgaactcctggactcaagccatctgtctgcctcggcctcccaaagtactaggattgtaggcatgagccactgtgcccagctgatctttgatttcttacaacaatcttttgtagcttttagcttataactcctgtacatgttttgttaaacttacacctaagtattttgattttttgagtgattataaattgtactgcatttaaatttttggttttcatgtttgttgctagtatatggaaatacaattgatttttctttttttaaaaaaaaatttttttgagacagggtctcactttgtcacccaggctggagtgcagtggtgcaatcatagctcactgcagcctcaaactcctgtgctcaagtgatcctcccacctcagcctcccaggtagctgggactacaggcacatgtcaccaagccccactaatttttttaaaaaatttattcgtagagatgggggtctcactatgttgccgaggctggttttgaactcctgggtttaagggatccttccatcttggcctcccgaagtgctgcagttacaggtgtgtgcccccttgttcggctgtgttggcatctgttcattgtgttttcttttcttttctttctttttttttttttgagatgaagttttgctcttgttgccccagctggagtgcaatggcgtgatctcggctcaccacaacctctgcctcccggtttcaagtgattctcctgccttagcctccgagtagctgggattataggcatgtgccaccatgcccggctaatttttgtatttttaacagagacggggtttcaccatgttggtcaggctggtcttgaactcctgacctcaggtgatccacccaccttggcctcccaaagtgctgggattacaggcgcgagccaccacgcccagctgttgattgtgttttctcattgaagtttagattttcccatttcttggtataatgagtgctttttggtggaaacctggactttggggtgtcataagactctggatctcatttaaatcttgtgttttagcaggcttcctgacccactttggcaggggaaggggatgcctcttcattattgccaagtaggggtggaagtccaggttttccacttggcctttgttgacacgtggagggaggttgtttggcacaagtgggagttcaggctctccagttggcctccagggataccacccttgctgggatggggaggggacctccactgatatgtggggtgggaggtggctttgttgcaactgagtgacgttgaaagtcctgactctccacttggctccctatggggacaagagtgactattttcaatgcgaatccgctaactccaattccaggaatgcctccaaaatgtctagttgatgtattactctttataccggatcacctattcactgtaacttttgcctttttacagaaacaacccttgatgctgttgcagaaatcataggttgtgacacccacagcattctctcaaccatctacacattcctccaagagtaagtatattttttccccaagatataagccctggttctacggggctactgtgtggagatccacctgccttgtggacacccaagaccatgcttctgtctgtaagctccctctaataattatcctatatggacaaactggatttgtctgcttcctacgttttctcagctccttgggcatttgggggtggctttgggggtggctttgatggaacactctctctgacatcaccccagggaagaggatgagtgctttcttacaattaagtggggtagaagtccaggttctccatatggtttccactgataccatgctgggggagagtctcctcacctctcagtgggaatgaaaatccagccctcggccgggcgcggtggctcacgcctataatcccagcacttcaggaggccgaggtgggtggatcacaggctcaagagatcaagaccatcctggccaatatggtgaaaccccgtctctactaaaaatacaaaaattagccaggcgtggtggcgtgagcctgtaatcccagctactcaggaggctgaggcaggagaattgcttgaacccaggaggcagaggttgcagtgagccgagattgtgccactgcactccagcttgggtgagagaaccagactccgtctcaaaaaaaaaagaaaaaataaaaaataaaaataaaaagaaaatccagccctccacttggccttctctgacaccatgccagggagaggggacagtggtgcctctttacagcctagcatgcgtggcagtctaggctttccaagaggcaagcatggggatggggctttttctgtggtttgggctggattagagccattattgtgtaaacgttttctgtcctctgaggctgcccatttcctggtcctgtggctagagagagaaggcttttcttagggcattgtctttgcctgtcggcatttccaggttgcttgcttcctagcacccagtctgggatatataaggcaacacccaccatgttgttccttgcgtcccagggtggctagctggtttgccttctctccaacttttggagtcttagattgttttatatataatgcccacaatttttagttgtacttagtaaaaggaatagggaaaattgtgtctagttcatcttcctggaaacaaaaatcttccatcttgttttcatagaaggccatggaactgtgctaaccactggaatctatttgttttgtttgtttgtttgagatggagtctcgctgtgttgcccaggctggagtgcagtggcatgatctctgctcactgcaacctccacctcctggtttcaagtgattctccttcctcagcctcctgagtagctgggactacaggtaaacgacaccatgcctggctgatttttttgtatttttagtagatggggtttccccatgttggccaggctgatctcaaactcccgacctcaggtgatccgcctgcctcagccttccaaaatgctggattacaggtgtgagccactgcacccggcccactggaatcctttttgtataatatcctggctgcgaagttagagtttttacacttgcatttggcagatgcaattcaaattggttaccaaaactttgaaatatattgagttgcttctaaaacaaattccatgcaggattgaagagtgggtaggctaagagggtagcaggcctgggaaatgaaccccaggaaactgacttagtcatgcaataaagactcaggtgttaccagtggagagtgtccaggttcttggcgttttgaacaaacaattggacaaaacgcacaaacaaagcaaggaaagaatgatgcaacaaaagcagagatttattgaaaacaaaagcacactccacaggttgggagcctgcctagcaggtggctcaagagcccggttacagaattttctggagtttaaataccctctagagggttcccgttggttacttggtgtacactctatgtaaaagaagtagtggcctgtgatcagcctgattggttgcaagaggggaccaatcagaggtaccttcaatttttcatctgccaggcagaaaagcggggcaggttgcaaagggactagcttctgttccttttgttacctgggcatggaaagttcgggttttccttttgatttagttctaggaagtcagcgtgaattggccttaggttccctgtctccagaccctatttttctgccttacggttcatattgggtttgctacaaggatattcaaactttgtgaattggcaagcaggaatctagagtttccagaacaatggagaggggccagaaaggtataaaaacttttgtgaaaacgtcaaaaataaatatttagttaaaaataaaatttcccattttcagattttgtgaatatctgtaagaatttccaggatatattaattcgctaaagttaataaaagcaagaaacagaaggacgtttcagaatgctattgtttgtgtaacaagggggtgctgaatacatacataattgcttggttatgaataaactggctctggaaggacacacatagctaatagcatcgttacctagggggaggtgaagtgggtcctggagaacagaaagggagattttccaccttacacacatttgccatcttatgattttgaacgataagagtccccccgccccttccttcctctgccctgccccttccttcctctgccctttactctctcaatatcctcttttcatgctttttttttttttttaaatcacttcgggtcctttaaaaaatttacttgcaagaagtacgtacatattctgaataaaattcattttcagatatatgtattacaaatatcttgtctgttctattgtctttcccttttctcaatggggtcttttcggtgtcttatagttacagacacccaatttatcagctttttcctttaggactggcactttttgtgttctgctaacacgttattttcctctcttatggtcataatattctgcgattttattgtctagagttgtattgttcacattcaggtctaccatccgtctagaattattttacttgagataggagtcaaggttcatttccccccaatcgaccttcaattgacctagcactatatattgaaaaaactcttcttattgcattacagtggctacttgtaggaggaaaaagtgactacatagctgcaggtctgtttctggtctctctctttttcattcattgtttttacctttgtgccagttatcacactgttctgattactgtggcattataatcatcttgataactgtatcgtgaattctccaactgtgttcttcgccggaagtccacggaacaccaaccacgaccttcggaatttccctccggaagatgaaggcactgtagttatgcgggtggaccctatcagatctcgggtccatcgggtcctgtgtacaccttgagggacgcccacccaacgcgcatgcgcagcctcaatgctgggattggacggagcctcgccggctgcgtacacgtcacttccgaggcgggaggatgaagttgattgactatggtctctccggctaccaggtaggggctggggaagaaggaacctccgagatgaggcgatagggtctggccttgagctgaggcgacgccccggcttgggtgaggggaagcggtgtagtggtcgagctaaggccgcgggccctgggcggcttccggatccccgcgacgccgaactctgaaggaagactcagcccaggcgctgggaccagagccctggctccggcgagtgcgtggcggggaaacccgcctgtcgccgaggtgtcttgagtccagtttccgctgctgggaatgggtgtcgcgccgggcgctgtgtgtgaaaggcctcgcgcccacagggctcctggcttcaacctgtttattcccacatttctgcgcgacgtaggggaggctccgcagcgtctgcgagtggcaggaccgagggttgagcgctgggggccagtggcaccttagccagtgacggcgagttaggactagcaaaggaagtccggtttttcagaaggcaggaggagggtgctgactcgagcgtccacgggaatggctggttgagatatcttgctcttccaatacttactctgcggcttcctggctgtgcggctttgggcaaatgttttaaactctgagtgtttcttcagctgtaactttgggagtaacaagcccactcataaggttgttgtgaagcgtaaatgagactgcgcgtgcaaggtgctcagctggtgtctggcacatagtaggtattcaacaaatggtagccacataatgctctttttttcagtttccaaaccttccatgtagtgattggagaatcgtgaagttacttttgaagtaacgtttgggtttcacacactcatacatttagtaagcagaattcttgcttacactgttgccgattgcaacggtgtgtttgcataatggaagctatgtttgtgcctttgccaagggtgtggaatatgccttccctaccatgtacatgtccccttttctccattccttaataatagttgatattttttgagtgtttgctatgttacaggcactgtactaatccctttactgaattattcaatcctgtaataaccctaatcataggaactataatttttatttatggagggagaaatgggcttagagatgttaagaagtttatccaaaggcatagagctattagccaggcaaggtagcacacgcctgtagtcccagctatttgttggggctgaggcaagtggattgcttgaacctgggagacaggctgcagtgagccgagatcacgccattgcattcaagtctgggtgacaaagtgagaccctgtcttggctgggcgcagtggctcacacatgtaatcccagcactttaggaggctgaggcgggcggatcacctgaggtcaggagttcgagaccagcctggccaacgtggtgaaaccccgtctctactaaaaaatacaaaaattggctgggcgcggtggctcacgcctgtatttccagcactttgggaggccaaggcgggcggatcacgaggtcaggacctcgagaccatcctggctaacacggtgaaaccccgtctctactaaaaaaattcaaaaaaattggctgggcttggtggcgggcgtctgtagtcccagctactagggaggctgaggcaggagaatggcgtgctccggatggcggagcttgcagtgagccgagatcccgccgctgcactccagcctgggcgacatagtgagactctgtctcaaaacaaacaaacaaacaaaaattagccgggcgtggtggtgggcgcctgtaatcccagctactcgggaggctttggcaggagaatcgcttgaacctgggaggcagaggttgcagtgagccgagatgccgccactgcattccagcctgggcgacaagagcgaggagactccgtcttaaaaaaaaaaaaaaaaaaaaagtgacaccctgtctcaaacaacaacaacaacaacaacaaacaacaacaaaggcatagagctagtaaaggccgatccaatgccatgtcactccagaacctagcgcttagctacaaatttcattcattccttcagatacttattgaacgtttacagtgtaccagcattgtgctgggtgttgtggatacaatgatgatcaaaacagataaagcccctgtctttaaattgcttataaatctagcaagggagatagtaaatatataaataaaactaaatattaattacgattgtgatgcatgctgtggaggacagtagagggtgctgtgaggatacataatggagtcaccggcatgcggagggggaaatgaggagagacagggaaggctttcccaagaaaataatatttagctgagacttaaaggactgagttggagttaaattggacaaagagctaacaggaggagggaagggcatgtgtgaggtcttgagactaggaggagcttgtatcttgttacttaaagacccctgtgaggctgtaggtggtggctcacacctataatccgagcgctttgggaggctgaggtgggaggatcatgtgaggccaggagtttgagactagcctgggcaacatagggagaccccatttctacaaaaaataaaaaattatctaggcgtgctggtgtgtacctgttgtcccagttactcagaaggctgagtcaggaggatcacttgagcccaggagtttgcggctacagtaaactgtgataatactacggcactccagcctgggcagcagagtaagaccctgactcaaaaaaaaaaaaaaaaaaaagaaaaagaaaaaaataagcattaaaccagactggaatgtattatggataatatgctaatgcagtttctttcagaaaagaaatcccaccacttatttgtatgcagctgagcagatacaacccattatgtagtctcaagattaatggtaatttgtcctcttataagaagacttgacagcaccatttgctgtacatgttttcatagttcattctaaattcacctggtaattgggttggtcatctgtgctacctagttacttttttccaaaggaaaacatgaaacagctctatgataaaacaagtagttgaggtgcctaggctaaacttccacagtgatagggatagggctggggcattgtcttcctggatatttccatttaaaatagggggtttggctgagcacggtggctcacgcctgtaatcccagtactttgggaggctgaggagggcagatcacctgaggtcaggagttcgagaccagcctggccaacatggcgaaccccgtctctattaaaaatacaaaaatgtgtggtggcgtgtgcctgtaatcccagctactcaggaggctgaggcaggagaatcgcttgaactgggaagcagaggttgcaatgagtcgagattgtgtcactgtactccagcctgggctacagagtgagactccacctcaaaaaataaataaataaataaataaataaacttacgtatgtatgtacgtacgtttgtaaagggggggttccaggcccttcagaaaaacagtcctgggttttactgtatttactgggtttaaacaagctaagctaggggtagtttatttagcctttaaaaagatttgcatacatatcaaagggacagaggaataatttataaatactgggtttttcaaagaaatgctgtgaggaaaaggaaggagagaagatctctttccctttggaaacagtgaaaattcagttttaaaatttttactatatgtttgcatgacaactaaaaaaaaaatttacttacagtacagtaaaatgttggactagagcaacatccataatgttggatggtgtaggaattattcattcccaccccattatacacataagaaacctttctttggtagccaatgttattttaatgcaaaaatgaactctctattctggaaggccataagcatgagggtgaaaattgggattgaatggtgtgtaaattcagtttgaaagcttcttgccacccacccagataggaaatacaacaaattccttaggattttacctgagctctccctcctatcttctaaagttcccagtaacatgaggcttggccatttaaactgcttagtggagggagaggtctgtgatggccactgaatttgctactggagaagagtcttgatccagacctcaagagagggttcttggatcttgtgtaagaaataatttgaggccaatccatagagaaaagtgaaagcaagtttattagaaaagtaaagaaacaagagaatggctactccataggcaaagcagccctgagggctgctggctggccacttttatggtcatttcctgattatatgctaaagaaggggtggattattcatgaattttctaggaaaggggtgggtaattcccggaactgagagttcctccccttcgtagactatatagggtaacttcttgacattgccatggcatttgtaaactgttatggtgctggtaggagtgtcttttagcgagctaatgccttataattagcatataatgagcagtgaggatgaccagaggtcactttcattgccattttccatttggtgggttttggccggcttctttacctcagcctgctttatcagcaaggtctttctgacctgtatcttatgtgacctcctatctcatcttgtgatttagaatgcctaacctgcgaatgcagcccagtaggtctcagccttattttacccagcctctattcaaaatagagttgctctggttcagatgactgataaattgattgaatattgcttaccagtggtttgagcttccttgctgtacttagctagtgttttattaagtaaggctatgtttgtactaggaacactaatttctgaaggggatataaatttttccagtttatatgagcagcacttagtggtcattaaattggatactactacattaagaaactaccattgcagaattctctatgagtatggcattataatccagattggtttaaaatgttagctaaactgaatcaaagaaactgtactgagttcctattaagcagctaacttgtttatgttcaattgttgcttagaagcctttgtattctgtttgagttgttaaaacttcagacaaactaaattcaacagagtttaactgaacaaagaatgatttgcagatcagcagcctctggaactagaataggttcagagtgactctggggtagctacatggttggatagtatttgtggacagaaacagcaaagtgacatacagaaaatggaagtgaggtacaggccaggcccagtggcttacacctataatcccagcactttaggaggccaaggcaggaggattgcttgagcccaggagtttgagaccaccctgggcaacatagggagaccccatctcttaaaaaaaaaaaaatatatatatatatagatagatagatagatagagatatgcaggtgtaccactcatgcctgtggtcctagctactcaggagactgaggtgggaggatcgcttgaacctgggaggttgaggctgcagtgagctatgatcacaccactgcaccccagcctaggtggcagagggagaccttgtctcaaaaaaaaaaaaaaaaaaacaaaaaaaaaacagggaagtgaggtgtagaaagagctagattggttgcagcctagtgtttgccttatttgagcagttggctgcctatgactggctgaaactgggctgctgtgattggctgagactgggctacttgttacaagagtaggttaaagtttgtttgcacatccagttaggttacaggtcactagctatggaggaacatttaggctaaacttaaaatatgtaaggaggcagctttaggctaaacttcttataacaaggtgattagagctaagcttagggatctcttcatctcttagacagtattagaatccttcctgtttaaagttccagctaaaggatttttttttttacatgaccccctatttgatgcacttaagagttaagaatgtgggcttcagagtctgagtacgttggttgaaatctcttttccaccatttgctagccatgtgacttcacgtacttttcttatttagcaaatgaaaataactgtcatacctacctccggattgctgtgaggatgaaatgagatcatgggtatggagaatgtgtatttcagtgtctggcacattgcaaatacttaaaaaagttagtaattgttattaatatttttccttttcaatagccatgtatggtactgtgaacccagaaaatctgagacaggtcttagttaattcagagagtttattttgccaaggttgaggatgtgcccatgacacagcctcaggaggtcctgatgacatgtgcccagggtggtcagggcacaacttgattttatacattttagggagacatgagacatcaatcaatatatgtaagaagtactttaattccatctagaaaggcaggaccactcaaagtggggccccccttcaggggcttccaggtcacagataggtgagagacaaatggttgcattcttttgagtttctgatgagacttccaaaggaggcaatcggaatatgcatctatctctgtgagcagagggatgactttgaatagaatgggaggcaggtttgccctgaacagttcccagctagaaggagcccaagatattttcctttcacatttccccacttttcttttttaaaatcatttggagaaagcattttagaagaaaatgaatctctggtctcaagtttcatctgatctctcatggttaggatggtttattcctagttagttaggtcctgaaagctcattcttagcaggttgtgaagtctcatgtcctgtgaagagaaaatggggggaggaagggagaaaaacaacaacaaacaaaagaacaatcctggaaaaatcgatattggccacattactctgaagtccacacattagtaggcaggtatgaaagtggcttatgtatgtaaataggttgctattattttcttctgaagtgtaagttgtctggcttcagtttgcagggctttaagaaagcacagcttagttttcagtgactccaaattaggaaaaatggaaaaaaaaaaggaaaaaaactgaaaacattattttgaagacttatagccaagaaaaattagaattcagttcaaactgtagaaaataataaaaattggaaaaacattaggcaagactagactccaacaacaggtttactatagttttgaaacataatttttctctctctggtttcccaattttgccaaagacaagtcacgctaggactggtttgctttattatacttgacctaattatttgtatacagtgcagcaagaataatttttttttacatacacttttaaattgctttgatggaacttgttccataggaggaatctcagataagactttctaaagctgagccatgatttgtgtcatcaaatacctatgagctgggtgaatttcctcacctctttaggttccaagataaacctggggcttctgggactgtcagaaagtgacattctttacttaccacaggtcagaaaccctgtacatggactgtatacacaaaatatgaggccagattttccaggggctttactggctctatatgtcacgtttgattccttaaaggaaagcactccattccagtcaaagccttggtaaaataaccagtttctccaattgtgtcctgctacaaatgaaaacacagtcttacagcactgatgcaaataactgtattgccataagaatactcataaatagtttccagattctggagtaatcaggtagagagaaacaaatatgttccaaattttgttcataggagtatgctgaattgttaaaagctgtcagtagctcaaaagaaaagttttgagactctgaaaaacaaaacaaaggatcagcaaacattttaagcaaaaattcagtccatgcagttaattcctgttctgcttgatactcatgaacattttagctctccgtgagtcctggaagtttttcctctattctgatatcacaatctctaaagttatgagaaacctgcattcaagagcacctgttagagttttgtagctgattataaaatcaccttctaaagaggaccaaaacaagacaacaattgtctgtggatgacaaaaagttttagggcagccatagtcaaagacaattgacaaggaaatttgttacctctgtgacacacaataattttatgattattactgataatgtatactaagttatatcagaattataggagtttcacataattttggaacacataccaataacatatttatacaaatacagcccaaaggaaaccaaacaccatttcatatttgacaatgcctcctgtataatttttggaccagataagccaaattatgttattttttggactttagggaacctctaatgtcttaaaggattaattaggtcagaaaaagacataatttattatttgatttgggaaagtttgtcaaatatcaaaggttttaaacacttgatatcacaaaataggatcacaggtctttgtaaaataagtcatccatttaaccaaaatgataaggatttcaaaaacaaaaaggtgaaaacctttatttgttgagagagaagaattaattttgcaaacaataagccttaataaaaccagcatgaagccaattaaatttgttttttaaaattttataaataatctataagattttaatcttgaccgtaagatatagcttccataagccttttataacctttattaaggagttggttaatgcttcaagaaaacctaactaatctgacacaggggcccatatgctggtcttgcatcagtgtgcctttgacattaataattaatttatagagaaactgaacttattttatctttcaaaattggccgttacaatcttacgtgcccacctcttccacaatagtccctgggctttgaggagttgaatagctttaactttttgccttgtgtgtcaggaatgcagtttattttgatgggcatcttctatggggcctgaagacaaggctttaattgcagtcagtgtttaagatttagcaagactggccggggatggtgactcatgcctataatcccagcactttgggaggccgaggtgggtggatcacctgaggtcaggagttcgagactagcctggccaacatggtgaaaccccgtctctactaataataccaaaaaaattagctgggtgtggtggtgcacacctgtaatctcagctactcgagaggctgaggcaggaaaatcacttgaacccaggaggtggaggttgcagtgagccgagatcacaccattgcactccagcctgggcaacaagagcaaaactccattaaaaaaaaaaagaaaaagatttagcaagacttggtgtcctgttttagatccaggactcaaagccctgtaactcaatgtcacaaggactttaaaagcacatacaggaagatacatggaggctgaatcacttgaacctgggaggtggaggttgtggtgagccgagatcacacctttgcactccagcctgggcaatgaatgaaactccgtctcaaaagaaaaaaaaaagaaaaggttttgtgggtttttttgtttgtttgtttgtttgttttgagatggagccttgctctgttgcccagactgaagtgcagtggcccgaccttggctcactgcaacctccgcctcccaggttcaagcgattcattctcctgcctcagactcctgagtagctgggattacaggtgtgtgccactatgcccagctaatttttgtatttttagtagagacagggtttcaccatgttagccagactggtcttgaactccctacctcaggtgatctgcccgtttcagcctcccaaagtgctgggattacaggtgtgagccaccgcacccagtcaaaaaaagttttttaatctcagtttttttatttctaagcaaaccaaaacttaataataatatggcaacttggtcatattaaagttttttggcttttaaaattttttttatttttatttcttttttttttttgtgagacagagtctcactctgtcacccaggctggagtgcggtggtgtaatctcagctcactgcaacctctgcccccagggttcatgcagttctcctgtctcagtctcctgtgtagctgggattacaggcgcctgccatcatgcctgagtaatttgtgtatttttagtagagacagggtttcactattctggccaggctggtcttgaactcctgacctcaggtgatccacctgccttggcctcctaaactgctggaattataggaattataggcgtgagccactgggcctgcccatttttcttttttgtctttttttttttttttttttgagacagagtcttgctctgtcacccaggctggagtgcagtggcacaatctcagctcactgcaagctccacttaccgggttcacaccatcctcctgcctcagcctccggagtagctgggacaggcacctgccaccacgcctggctaattttttttttttttgagatgaagttttgctcttgttgcccaggctggagtgtaatggcataatattggctcactgcaacctccgcctcctgggttcaagtgattctcctgcctgagcctcccaagtagctgggattagaggcatgtgccaccacgccaggctagttttatatttttagtagagacggggtttctccatgttggtcaggctggtctcgaactcccaacctcaggtgatccgactgcctcggcctcccaaagtgctgggattacagatgtgagccaccgcacccggcctctggctaattttttgtatttttagtagagacggcatttcaccatgttagccaggatggtctcaatctcccaacctcgtgatctgcttgcctcggcctcccatagttctgggattacagccaccgcacccagcctctggctaattttttgtatttttagtagagatggcatttcaccatgttagccagggtggtctcgatctcccgacctcgtgatctgcttgcctcagcctcccatagttctgggattacatatttctgggattacaggcctcccatagttctgggattacaggtgcccggcctcttttaaaaaaaaaatatatatatatatatatatatatatacacacacacacacacacacacacacacacatatatttattgcgacttatactgaccattcgtgacatgcttggactttctcatttgtcttgaacatccatccctccttctttttttttttttttttttttttgagatggagtctctctctgttgcctacactggagtgcagtggcgcgatcttggctcactgcaagctccaagctccgcctcccgggttcacaccattctcctgcctcagcctcctgagtagctgggactgcaggctgccaccaccatgccccactaattttttctatttttagtagagatggggtttcgccatgttagccaggatggtcttgatctcctgaccttgtgatccacctgcctctgcctcccaaagtgctgggattacaggtgtgagccaccgcgcctggcaacatccctccttcttaaacaaccagtcattttattttaggactaaatttaccatacaatattctttctcgtaaaattatttttctttaagctttcttaccacacatacaaaaatcctatttatttttaaaactttctttacatctctttttattttctggttccttttaccttgttttatatgtaacctttaagtaagctgtgaattagacaaaacttgttcacccttttttaaaaaggacacatccttctgtttttttagcaagaatgttttcctacaatatatatttattggaaaatacccaaataattaaatacctattatttaatttaatataactttatattctaaattatgaccagtttatctacaggtatttatcccattacatttacctaattattttatttgtttacgtacattatttatgaaaactatgatagtcataatttaaagttatgaaaccaccattgcaaaattgtaacagtgaaaaatgatttgacctaactaaacttcatcttgctcttaacctccaatctgtccttgttcattcctgggcataggctgaactaactttgggaggaacttatagtttagctttgaaacaaagatgataacagtcctttcccaaaagaaacctccttattgcctgtggactagactgcctaaagccatgaggttagaagttatggtaattttaccatatttaagatgcagctattttcattaaaccagtattaatgtcttatttattaaaaattacacaagcgaagatcattctgttttgggctgggtttaatgttttgtaacccccgtgccatattttgacaccttaatgtatctggcagagaactatgaaactgcttgattaggccacgcatggtggctcacgcctgtaatcccagcactttgggaggctgaggcaggcagatcacaaggtcaggagtttgagaccagcctgaccaatgtggtgaaaccctgtctctactaaaaatacaaaaattagctgggcgtggtggcacgtgcctgtaatcccagctactcaggaggctaaggcaggagaatcacttgaacctgggaggcagaagttgcagtgagccaagatcgcgccactgcacttcagccctgggtgacagagcgagactccatctcaaaaaaaaaaaataaataaataaaagaaattgcttgattaataaatgcaagcaaaaatgaatgctggcaattgttaagacatttctaatgtttcccaataattttaaaacttgctttttattaaagagtctacttaagttacatgaacttgaaaaagcatttgagtagtcttttttagtatctgatttaagtgcttttttaaagccaattacctagagctcttttatatgtatttttagtagtgaaacattgtgtacacaacacatacacagacatataggcatgccaatagaagtacattttgtagattcatagaaaccttttttttcctatcagactttcagattcttttttttttttttttttttgagacagagtctcactctgtcgcccaggctggagtgcggtggcgtgatctctgctcactgcaagctccgccccctgggttcacgccattctcttgcctcagcctccccctagctgggactacaggcgcccaccactacacccagctaattttttgtatatttagtaagatggggtttcaccatgttagccaggatggtctcgatctcctgacttcgtgatccacccgccttggcctcccaaagtgctggaattacagctgcacccggcctcagattcttgataacttgttttacaaccctgggcagctgtcagctacgtagccttaaatttgcatgttaaaggaaccaactcaggtgaaagtcaaatagcaaagtttacattataaggtgcggagagaaaaagtttgggttatagaaattttaaaggccttttaaatacacacacacacacacacacacacacacacacacacacacacacacacacacacacacaccctgacaccctatagcttttacttcagaactttttgccactagataaatagaaatttactggcttgcaaaaatatcttgttggatctaaacagtggtttttatcttaatagaaaaataacagcagattgagagcaggcagaaaagaaaaaatagagaaaaagagtacttaggaactctgtagtttgcaggtcaaccttaggcctccttttccttaatgtgaatgtgcacagagaccatattatttccattttacataaactttggcaagtagaggtgccataaaacctatggaatgctcaaaaggggtcattctccttttctcctcattcttcgattatttgcttcctgccctttttcttttttttcttaaaagggggaactgagcttgtagcctagggtttttgtgtggtggatcaatatgtgctccttgtgggcaggactacacagtatgtcagcactgagtcgcttccacccttttacatgtctcagtttctctctccagaggtctgtgacctcagagagggctcagaacactgggtgatcagtccttatatgcgattcctggacgagccattttaaaaattaatttctgttggggatttccctgcaagcctgctgcatgtcattgtcgggggcggaacttaacccccagacacccccaggaggccaccggtcacccaggggtgccttctggctgggaggagcaaaacaccctttttcttctcaactgacaaaactcagtctctcattaacatatgaaaacagcagttcaatttctcacacaaatgcacacagaaaaactgaattaacattaaatttgagagaaaaagcaatagggaagagcctttagaatgcatctctgaactagaattaggttccttaacaacttcagacaggaacaaatagcaaaaacaaacacacacacaaaacagcaataggatcactgagcgctccaatggtaaggaggaattacgaccagttagttgttaatattaactttaaccaagacaaaccccagttcagttacttacctagggatgagtctcaggctgaagactggtttctaccagcaagaaagcaaaaaaaaaaaaaaaaaaaaacaacctcatctcaaactccacaaaggagttactactgccttccatcattatggaagcaggaaaatcacttgccttgtgctggaagcaggtaaaactccaaaaaaaaaaagaggagttatacagcaaaataaactttagatctcgatcaaattttgggagatcagggattctctggaaggagtgctctcagatcccagcaaatcgtcctattggtttgtgccataaaggtagctgatgctggtaccaagcaccaataggaaatttgtcaaaggtcaagggcatctccactcagaatacccccatggttaccaaaatgtgaacccagaaaatctgagacaggtctcagttaatttagaaagtttattttgccaaggttgaggtgtagcaggacaagctgcggacaaaacccctcagacaccaagatagtgaagggagtggctttcatcagctgggagcatcggcaggctagtgtcttaaaatccgagctcttcaggtgctcaacttctgtcccttttaaggactcacaactctaagggggtccacgtgagagggtcatgatcgattgagcaagccagagggtacgtgacaggggctgcaagcaccggtggtcagagtgaaacagaacagaacgggaggtttcacagtgtctttccataccgtgtctggaatctatagataacatcagttgctaggtcaggggtcgaattttaactaccaggcttaggtcaggcaggcccaggcctggtttccggtctggttcctaggcaccgggctacctgtctttagtttcgcttctctttccttttctgagtataaaacaatataaaacaatatgagagggtctctctcttccttcagaggatgtgcccatgacacagcctcagaaagtcctgaagacatgtgcccaaggtggttggggaacagcttagttttatatattttaggaagacatgagacatcaatcagtatatgtaagaagtacattagttccatccagaaatgcagggacaactcaaagcaagcaagctctcccaccccctcacccccctcccccgccccgccgttaccctgggggcttccaggtcacaggtaggtgagagacaattgataacattcttttgagtttctgaagtctttccaaaggaggcaatcagaatatgcatctatctctgtgagcaaagggatggctatgaatagaataggtagatttgtcttgagcagttcctagcttgaaggagcccaagatattttcctttcacagtaataggctaaaaattacttggggttttgtttgtatgtttgttttgaggtggcgtcttgctatgttgcccagactggagtgccgtggcacaatcttggctcatcacaacctccacctcctgggttcaagtgattctcttgcctcagcctcctgagcagctaggattacaggcacctgccaccacgcccagctaatttttgtatttttagtagagacagggtttcaccatgttggccaggctagtctcgaactcgacctcaggtgatccgcccacctcggcttcccaaagtgctgggattacaggtgtgagccaccgcacccagcctaatttttgtatttttagtagagatggggtttcaccctgttggccaagctggtcttgaactcctgatctcaagtgatctgcagccttggcctcccaaaatgctgggattacaggcgtgagccactgtgtctatccaaaattacttgcttttaaagtatgatttggacatctgtgtaatattgtttcactcaaagctgtcatgtgagaaatagccacaggatgggcaaaatgttaattatattagaaataaaaatgtacttcagatttgtgaagttggcatatatagtgttttctacaacattttcaaaggaatgaaggattgtgacattacagcattttgtaatatataaaaagcacctgaaaggagcatagttcctctctccctatcaattgtcaagtatttacagagggtcagtttttttcctctcattttaacccacgagatttacaaattatgatagtaaaatagtggttctcatatacctgtgtgtgccccttctgaggatccaatctggcagcttgcacaaaagagttgtagttattgctgactgctgactcttcggggtagcaattggggtgctgaaatcccagttactgaaaacgagaagattacagcgagggagcctaacatgttaaaagtgtttgctctttttcacatctgcttttcatttgcttatcatttcagatgtttattcagcatcaagcttgtgcatggcacaggaaacagagagatgaatcaagtggcctttcttaggccaccagagagagaccacctgtggacaggtcaagtgcaaccaagggttctaagagctatggcaggaggctccagacaattctgggctttctcatgatctaatttcttactatcaggttgagaaacactcacctgatgtagacatgcagcagtagaggatgcttgtagcagctgaggacaggtctgaggacagatcattccagcagactccattcaacatgtaatgctttatagtgaatgaggaactgttacctctttacgtcttatcttataagtgcctagagatgcaggtagaatgagaatctactcattctggaggtgagaaaactggggcccaaaggggataagttcccaaatcaaacagaggaagtaaatggtggcaacatttttactccaaataagttgctccaacatgcagtaactataaaactaacaagcatttcatttgtcatgctggactaccttagtttaaggaatctagatttatgaaaacccaggtttactgattcacccaagtttaaatggtgaatatttgcattgcagaaggattttccaggctgggcatggtgactcacgcctgtaatcccagcactctgagaggccaaggtgggtggatcacctaaggtcaggagttcaagaccagcctggccaacatggtgaaacgctgtctctactaaaaatacaaaaattagccaggcatagtggtgcgtgcctgtaatcccagctacgtgggaagctgaggcagaggaaccgcttgaacccaggaggcagatgttgcagtgatcccagatcacgccactgccctccagcctgggtgacagagtgagactctatctcaaaaaataataataataataatattttccaataaaagtaggtattgtaacttggagtgtacagatgggcttcaagagttttgtaggtctcctgaaatcatttccacaattttgtatatacttaccttttagcagacatagtaataatcagatttccaaaggaatctatacagagaattggtagagacccccaccactctagtggattaaaaaaaatcaacctgtaggccatgcacggtggctcatgcttgtaatcccagcactttgggaggccaaggtgggcggatcacgaggtcaggagattgagaccatcctggctaacatggtgaaacccaatctctactaaaaatacaaaaaattagccaggcatggtggcgggtgcctgtagtcccagctactcaggtggctgaggcaggagaatggcatgaaccccggaggtggagcttggagtaagccgggatcgcgccactgcattccagcctgggcgacagagcgagacgccgtctaaaaaaaaaaaagaaaatcaacctgtaaatttttaaattatagtacttaatggagtgcttctcagtaactcttcagaaaacgtgtttaaaaagaaaacatttaaatgcaggtttatgggaaaatgttacatttcttagtatgttccatgtggtagaatattgtactgtgtagaagcatctcaattaatgaaaaggggaattttaaaaggtcacttcattttccattgctggataaggagagataaagaaatttaaactacagatggttcccaacttatgatggttctactcaaccatttttcaactttatgatggtgcaaaagtcatatgcatgtagaaactatactcaagtacctatacacccattctatttttcactttcagtacagtattaataaatcacatgaaataatcaacactttattataaaataggtttatctgagatgattttgcttaactgtaggctaatgtaagcattctgagcatgtttaagttaggttaggctaaggtatgatgtttagtaggttaggtgtattaaatgtatttttatttatggtattttcaacttatgatgggtttattgagacaatcccatgtaaattgaggagcatctgtagttgatttggttgcccattaatgttgggcacaaggaagaataataatttatccattttcttcgttcgttctctttactgtttcttatattacctaacaccccctcagatagataacccagcagttgtggtaataatatcatttaactagaccaaataaaaggcctcctaacctacatataagcctgggcactgtagcatagtacatgtttgtaatcccagcactttgggaggctgaggcaggcagattgcctgaactcaggagctcaagaccagcctgggcaacatggcaaaaccagatctctacagaaaattatctgggcacactggtgtgcacctgtagtcccagctacttgggaggttgtggtgagaggatcatttgagccccggaggtcaaggctgcagtgagctgagatcacactactgcactccagcctgggtgacggagtgagaccttgtctcagaaaacaaaaacaaaacagaaaacaaaaaacatgcatatacctatttaatcctttctgcagtcttataaggtagatattagatacattttgcagatgaggaaactggcagaaacattaagtaacttgttcaaaggcactcacttagtatgatgttggtatttgatccaaggtctgcctggttccaacaatagtttgctatatcaagcatttgaaatggtcattcacacctcaaatttatttatatctcagtagaaaaatggcagctagcaacttgatcttaagcaaaaagcaagtcagacttgaatttaaagagaaattattttatggaaaaaacaatgaattgcaagaaacaaaatgtggtttcttactgaataagaaggaagatgtggttggacaactatagcaactgaccccaggccaagggtactggttagtgaggaaacgttaattcttacaacaagaggaaagttttgcaatgatctactgtctttttctcataaacttggaattaaggatatttcctttttccccaaacattttttatttaacttggcaaatataatgtcttaaaaggcatctcttcttgaaagtttctaattgccgtgcactactatgaagacatttggataggattatttcagagacataatttctgtgtgattagggttttttgtctattttatcaagattttaatttctagcagtgggataattatattaataagttcttgggaaatttgtggcgcttagagtctgttgaggtgctgaacagagctgggggtcttgctgtagccagtgatctcaggacattttaaacgctgccactgttgtaggccaaaaccagtgtgccttatatcagtgaagactctgaagccttgggctatggcagaacttggggccctgaagtacacatggaagtcagcccactgaacatgggctgacaaaaagagtggagaaataagaatatatatttggactacttctggttccaaagtagcaacatagaagcaagctgacttcactcacctccacagacaaccaaaaacaaatgtatagtgctgagattatcacgagaattgtcccagaactcaaacatgaagatgagacagttctcgaggccatggagaaatgaaaaagctccgagcagatggtaagagaattggacttccatatcccttctgcctggcaccaagtgtgaggaaaatttccctgcaagtcaccatttttgcactggaaaaagtaagactgagatgaacaaccaacatccctatcatcttggattccctagcaggagacttgtccctgccttaacccacaggaagcatctcaagtgcctgaagggagaaatccctgaggacaggcagagacaaaggtgggaggcaggtctgccatccccagccctggaaactctgctctgtaattcagccaaaggagatggcaaatcataatggctgctcagcaacacaacactgtaggaggtttcacctacaggtcccttgggcacagtgtgggaggatcaagaattcaaaataggccagcaccatggctcaagcctgtaatcccaggactcagggaggctaagacaggaggactgcatgagcccaggagtttgagaccagcctaggtaacatggtgagatagtgtctctattttaaaaaataaaataatttttgaaatttattttatactttttgtagagacaagttctcaccatgttgctcagactggtgtcaaactcctgggctcaagcaatcctcccacctaagcctcccaaaacactgggattacagggagaagccaccatgcccagccctaaaaaataatttttaaaaaaagaattcaaaatagtagtttcaaggaaactcaatgatctccaagataacacacacaaaaaaaattcagaaatttatcagagaaacttaagatattgaaataagaaacagaagtctcagaactgagaaatacatttgctaaactgaaaaattcattagtggctttcagcagcagaatggatcaagcagaggaaagaatcagtgagctgaaagatgatttgaaaatacacggccaggcacagtggctcatgcctgtgttcccagcactttgggaggctgaggatggatcactttaagtcaggagttcgagaccagcctggccaatgtggtgaaaccccatttctaccaaaaagtataaaaaattagccgagtgtggtggtgtgcacctggaatcccagctacttgggaggctgaggcaggagaatcgcttgaacctaggaggcggaggttgcagtgagccaagatcgtgccactgcactccagcctaggcgacagagcgagattgtaaaaaacaaacaaacaaaaccagaaaatacacagaggtaaaaaaaaaatgatgaaaagccatgaagattgcccataagatgtagaaaactacctgaaaaggcccaaactaagaattactggtgttcaagagagagttgagcaagagcaaagggtagaaagcttagtctaagaaataacaacagaaaactttacacaacttaagaaagatataaatatttgggaacaggaaaatcagagaacatcagatttgacccaaataagaccccaaggcatataataatcagactcttaaaggtcaacaaagagagaatcctaagagcagcaagaaaaaagaagcaaataatataaaggagctccaatttgtctggcaacagacttctcaatgaagaagcctcatgggaaccatgatgcaaaaaaagcatgcaggaaaccatacaggccagggaggtatggaacgatattttcaaagtgctgaaagaaaaaaaaaacctgccattcaaaaatactgtgtccagcaaaattgtccttcaaatatgaaggagaggtaaagtctttcccacataaaccaaagttgagagaatttaccgccactaaacccatcttacaagaaatgctaaagggagttcttcaaacagaaagaaaacactcatgggcaaataggaaaacatttgaatgtctaaaacccactgataaagttaagtacgtggacaaacccagaatactctaatactgtaattgtggtgttcaattcactcataagtctagtatggagcccaaaagacaaatctatcaaaacaaaaataggtatagcaacctgttaagaggtagataatataaaattatgtaaattaagacaactaaaagtcaaaatgtggggggacgaggataaagtgtagagggagttttttaaacatatttttctttgtttctttgttatttaagataagttgtcatctctttaaaatgacttattacatctgtgagatatttttttgtaagcctcatgggaaccacaatgcaaaacacttgtaataggtttactaaaaatataaagcaacaaaacattctaccagagaaaatcacttaaccacaaaggaagaccagaagaaaggaagagaggagttgcaaaacaaccagaaaataaggaacaaaatggcagtagtaagttcttatcaataataacactgaatgttaatgaactcagttctccaattaaatagcatagaattttctttagccaggcatggtggctcatacttgtaattccagcactttgggaggctgaggtgggaggatcactggatcacttgagcccaggagttcaagaccagcctgggcaacataacaaggctccatctctatttaaaaaaaaaaaaaaaaaaaaaaaaaaactaaggcatagagtatctgaatggataaaaagtccttggaaaaggggcaaggtgtctggtatggcagacgaggaggctggtaaatctcctagaaaaccaacctattaaaaaagtatgaaacaggatgaaattattaaaaacaaccacttcatgggtgtagaaattgaccaaagacatgcaacaaatcaagaagcatttctttgtccgggcatggtggctcatgcctgtaatcccagcactttgggaggctgaggcgggtggatcacctgaggtcaggagtttgagaccagcctggccaacttggtgaaaccccgtctctactacaaatacaaatattatccgggcgtggtggtgcatgcctgtaatcccagctacttgggaggctggggcaggagaatgtcatgaacccaggaggcggaggttgcaatgagccgagattgcaccattgcactccagcctgggcaaaagagcaaaactccgttttttaaaaaagcatttattcatgaaaaaacatggaactttgagtaagagcagtaggagtctgtgacagacatgccgagagctataataaaattaccacaaatttagtggcttaataaaccacatatttattattttatagttctaaaagttggaagtcctaaaattaagccatcagcagtgcttgatttcttctggagggtctaggataactcccctatctcgagattcttaaattaatcacagctgcaaagtttctttttaccatataactgaagtaacatgcccactgattctagatattaggattagaatgtggacatctttgagaggtattatttaggctaccacaaacattaatatacatatccaagaaactttgtgagctccaagtaggacagacacaaagagatccaccacatctagatacatcgtagtcaaactgttgaaagccaaaggcataagctcaaaagcagcaaaagaaaaattacgcatcagatacaagggaacaacagttatgtgattagtgtctggcttctcattataagaaatggccgcagggctttgaatttacagtccagcaggtaggtagcttagaagttgccacttctaggctgggtgcggtggctcacgcctgtaatcccagcactttgggaggcctaggcaggtggatcatgaggttggagttcaagaccagcctggccaagatggtgaaaccctgtctctactaaaaataaaaaattaaaaaaaaattagctgggcgtgttggcaggcacctgtaatcccagctatttgggaggctgaggcagagaattgcttgaacctgggaggcggagttggcagtgagccgagatcacaccactgcactccagcctggatgacagtgtgagactctgtctcaaaaaaaaaaaaaaaaagaagttgccacttgttcctaacaagtaaaaagcttaacaaactgaaaaatcaactcttctttgatacatcagagacatgaaatcataccgcacacagttgcccccaaaataaaagacagataggtggatacatggaatcacacttactggagcagaaacctctgtgggaaccagtcctgtggtaggaaaacatgaagtgtaattgacaaattgctggagactcagtgtggacaagtctgagagtgatttagttgaatgttgttcccactaaaatctcatgttcaattgtaatccccaacgttggagatggggtatggtggaaggtgattggatcatgaggaatcttatgaaatggtttaatgccatcctcctggtgctgtcctcgcaacagtgagtgagttttcacaagatctggctgtgtaaaagtttgtggcatctttcccccttgttctctctcgctcccactctcaactactccctgttcaccatccaccatgattgtaagcttcttgaggcctccccaaaagctgagcagatgccagcaccatgtttgctgtgaagcctgcagaaccatcagccaattaaatctcttttctttatgaattacctagcttcgggtgttgtttttttatttttattttttgagaaaggatctcactgtgtcacccaggccagagtgtactgtcctgatctcagctcactgtagcctcagcctcctgggctcaagtgatcctcctgcctcagcctcctgagtacctgagacaacaggcacatgccaccacacctgccttatttttgtattttttgaagagacgggatttcaccacattgcccaggctagtgtcgaactcctggactcaagcaatatgcctgcctcagcctcccaaagtgttgggattacaggtgtgaaccaccacacccagcccaggtgtttctttatagcaatgcaagaacagtgtaacacagaaagttataaacttcagtgggacccagtcatggggggtgctcatgctttccgtaagttttacctccaagagttctaccagcccctcacaatgaatattggagagacatccctttgtgcttccagcagagggaggggaaaaaaaatcatcactttgaaatatgccagagcattctgctcatcttaacaatgcctgccctcaggagaaactattttaccagagtctaacttactttggggaagggtaatactcaacctcagctcactctattctttcatgtggggaaaattaatacccaactccagccctctctagccatcctgtcccacctgaagggggaacactgagaggcactggtgaaatttatagttcacaggctcaccaaaaaactgagacctaataggactgtagaacacttccccttcctccagcaccttaccactacgttactaaaggcctgtttgccacagttctttttacccagtgcatcctgtccaccttttgattaaaaaattacaagtcatactaaaagggaaaatacacagaagagactgaagaagcatcagaaccagagtttgatatggcaggaatgctggatttatcagaccaagaatttttaaaaatcatgattaatatgctaaggactttaatggaaaagtagacaacatgcaagaactgatgggtaatgtaaatagaaagatgaaaaatctaagaagaaaaacaaaatgctagaaatcaaaagtgatacaacagaaatgaagaatgcctctgatgggctcagtagacgggacatggcagaggagagaatctctgagctttgaggatatgacagtagaaacttccaaaacttaaaagcaaagagaaaaaagactgaaaaaaacaggaacaaaatatccaagaaatgtgagataactacaaaagatgtaacatacacataattggaatgccagaaagaagagagaaaggaatagaagcaatattttaaggaataacgttgagaatttcccccagaattaatctcagacaccaaatcgcagaacaaggaagttcagagaacaccaagcaggatgtcttagtcctgtagactgtgtaatttataaaaaaacagaaatgtcttacagttccagaggctaggaagtagaagatcaaagcactggcaggttcactgtctggtgagggcctgttccttatagaaggtgccatctaagtgtcctcacgtggcagacgggatagaatgggtgaaaaaaagggggaagggcatgtaatcccattcatgagggcagagcactcatgactcaatcacctacaaaaggtcacaactcttaatactattggattggggatacagtttcaacatgaattttaaaagggacaaaaacattcaaaccatagcacaggataaagggaaaaaagactatacagacatttcatagtcaaactacagaaaatcaaagataaagaaaaagatctagaaaaaaaccagagaggaaaaatgctacctatagaggaggagagataagaattacatctaggttgggcatggttgctcatgcctgtaaatcccagcactttgggaggctgaggtgggtggatcacctgagatcaggagtttgagaccagcctggccaaacatggtgaaaccctgtctctactaataatacaaaaattaactgggtatggtggcatgcacctgtaatcccagctactctggaggctgaggcaggagaattgcttgaatccaggaggtggaggctgcagtgagccgagatcgtgacattgcatcccagcctgggagacaagagccaagctctctctccaaaaaaaaaaaaattacatctgacttctcagaaattatgcaaatgagaagagaatggtgtgaaatatttaaagcgttgagagaggaaaaaaaacccaccaacctggaattctgtaccctgcacaattatccttcaaaagcaaaggagaaatagagactttctcagaccaaaaataaataaatgaaattggaggaatttgttgctggtagacctgccttgcaagaaatgtaaaaagtttttcggagagaaagaaaatgatatgagtcagaaactctgatctacataaaagaacaacattggaaaaagaataagtgaaggtaaaagaaaagcattatttttcttattcctaattgacctaacagataaaagtttgttcaaaataatcatagcaacaatgtattttattatgtatgcttttatataccaatacattatgtatataaatgaacataaatatgtgtttatgtatttttagttataagtgaaatgaatgacagcaacagtgtaagggaagagagggaagaatcaggagtattttgttattatatgatacttgcaatgcctgtggagtgatatagtgttatttgaaagtggacttggattcattggaaatgtatactgtaaactctagggcaaccactaaaaaaagtttttttaaaaaaagaagcatagttgataagctatgaagggagagaaaatagaatcatataaaatgctcagttaaccacagtgggcagaagaactgtggaagacaaaaagaggagcaaagaacaagggtaacaaatgaaaaaaaattaacgaatatggtagctattaatccagctatgtcaataatcactttaaatgtcagtggttttgtcagttacatcatttaaaaggcagagattgtgagagtttatcaaagaataagacccaaatatatgttgtctaccagaaaccaactttaagtataaagacacatatagattaaacataaagagatgaaaaaagatccaccatactaacactaattaaagaaagtgggagtagctatatttctacacagagtagactacagagcaaggaaagttatcagggttaaagagcattacattatgaccgcagatcaatcctccaataagacaataatctttaatgtatatacacataatagagcatcaaaatatgtgaggcaaaaactgatggaactgcagggagaaagagatgaatccactattgtatttggagacttcaatgctcctttatcagaaagacagatttggcatgcagaaaattagtaagaacatagttcaactcaacagcggtcaattggatatagttaacatgtataaactactttgtccaacaacagcagattatacattcttcccaagtgaatgaaacattcacttagaccacattctaggccacaaaacacaccttaataaatataaaggaacagaaatacattgtctgcttccagaccacgatggaattgaactagaaatcagtaacagaaagataactggaaatcccccaaatagttagtgattaaacaacatacttgtgaataacacatgggttaaagaagaaatctcaagagaaaactgaaaatattttgaagtaaaagaaaatgaaaaccttaccaaatttgtagaatgcagcaaaagcagtgcttagagggaaatttatagcattgaatgtatgtattagaaaagaagaaagatctaaaatcaacaatctaagtttatactttaggcaactagaaaaagaagagaaaattaaatccaaagtaagcagaagaaaaataataaaaattagagcagaaaccaatgaaattgagaataggaaatcagtacagaaaaccaacaaaactaaaagctggttctttgaaaagataataaataaaatcaataagcctctagtccagctaagaaagttagctaaaaaactaaggcacaaatgactaatatcagaaatgaaagcaaggacatcaccacagagcccatggacatcaaaagaataataaatgtagccgggcgtgggggttcacgcctgtaatcctagcactttgggaggcagaggcaggtggattacctaagatcaggagattgagaccagcctggccaacatggtgaaaccacatctctacaaaaatacaaaagttagccaggcatggtgttgtgcacctgtaatcccagctacttgggaggctgaggcaggagaatcgcttgaacctgggaggtagaggttgcattgagccaatattgcaccactgcactctatcctgggtaacagagtgagactccatctcaaaaaataattataataaaaaaaataagccgggcgtggtggctcatgcctgtaatcccagcactttaggaggccaaggcaggtggatcacctgaggtcaggagttcgagactagcctggccaacatggtgaaaccctgtctctactgaaaatacaaaaattagttggacgtggtggcatgcacctgtcatcccagctattcggggggctgaggcaggagaatcgcttgaacctgggaggtggaggttgcagtgaactgagatcatcccattgcaccagctagggtgacaaaaacaaaattctgtctcaaaaaaaaaaaaaaagaatgctatgaataactctgtgcccatttcttgataacctagatgaaatagaccaattccatgaaaagacaatctgccaaaactcacgcaataagaaatagacactctgaatgggcctgtatctattagagaaatggaatcaataataataactttcccaacagaaagcaccaagcccagatagattcactgatgaattctaccaaataattaagaaagaattataccaattctctacaatctctcccaggaggtagaagcagagagaatactttctaactcaacctatgagacttccattaccctaataccaaaaccaaagatattacaagaaaataaaaatatgtaccaatgtctctcatgagcatagatgcaaatatcctcaaaaaatattagcaaattgaatgcaataatgtatgaaaatgaccaagaccatgaccaagtgggatttatccaagatgtgtaagtctggttcaatattcaaatcaggctaggcacagtgctcatgcttgtaatcccagcacgttgggagggctgaggtgagagaattgcgtgaggccaggaattcaagaccagcttgggcaacagagcaagacctcatctctacaaataataaaatcagccaggtgtggtagtgtacacctgtggtctcagctacttaggaggctaaggtgggagaactgcttgagcctgggcagttgagggtgcagtgagttgtgatcataccactgcactccagtgtgggcaagaaagtgagaccctgtctcaaaacaaaacaaaactaatgtaatctggctggaggtggtggctcattcctgtagtcccagtactttgggaggcaaaatggtgaaaccccatctctacaaaaatgacccaggtgtggtggcacactactgtagtgccagctactcaggaggctgaggcagaaaaattacttaagcctgggaggtaagggctgcaatgagctgagattgcaccactgcaccccagcttggttgacagagtgagaccctgtctgaaaaaaaaaaataataataatccatcacatcaacaaactaaagaggaaaaaaagtcacatgatcatatcagtagctgcagagaaagtatttgacaatatctatctctgattcatgattaaaactctcagcaaatcggagtagaggggaactccctcaacttgataaatacttaaaaaaaactacagccatcatacttaatggtgaagaactcagcttgcccactaagatcaagaacaaggcaaggatgttccctctcaccactgctttaaaaaaaatttttcccacccaaatctcatattgaatcattactgttttttaacatcatactggaagtcctatatagtgcagtaagacaagaaaatgaaataaaaattgtagagattgggaaggaagaaatgaaaatgtatttgttcacagatggcaatcatttatgtaaaaactctgaaagaataagaaactaagcaaagttgcaggatacaaggttaatgtataaacatgaatcacttttctgtataccagccgtgaacaagtagaatttgaaattaaaaagacattaagtatgaacaggttttttaatgaggcagactataaaactgtgatgaaatgtatcaactaaatagatattccatgttcacagatagaacaactcaataatgtcaagatataatttcttcctagcttatctatggagtcaatgcaatcccaatccaaatcccagcaagtcattttatggatattgacaaactgattataaagtttatgtggaaaggcaaaagaccaagaataaccaactcaatattgtgggagaaacaagttagaggactgacgctacctgactccaagacttagtataaagctacattaatcaggacagtgatattggtgaaacaacaagtagatcaatggaacagaatagagagcccagaaatagactcacataaatagagccaactgatgtttgacaatggagaaaagatagtcttttcagcagattgaaacactatctgcatgcaaaaaaaaaaaaaaaatctaaacacagacttcacaactttctcaaaagttaactcaaaatggatcatagacctaaatgtaaaatgcaaaaccatgaaactgctagaagataacataagagaaaatttgatgacctcgggtatggtggtgacttttgggcatgatccatgaaagaaataattgataaactggacttcattaaaattaaaaacttctagtctgagaaagactgtgtcaagagaatgagaagacaaaccacagactagtagaaaatattttctttttctttctttcttttttttttttttaaagacggagtcttgctctgtcgcccaggctagagtgcagtggcgtgatcttggctcattgcaacctccgcctcccgggttcaagtgattctcctgcctcagcctcctgagtatctgggattacaggagtgcaccaccacgcccggctaattttttttttttttgtatttttagtagagacggggtttcactgtgttggtcaggatggtctcaagctcctgacctcatgatcctgctgccttggcctcccaaaatgttgggattacaggcgtgagccaccgcacccggccaatattttcgaaagacacattttaaaggactgttatcagttggaatggtggctgatgtctataatcccagcactttgggaggccaagatgagaggatcactgagctcaggagtttgagaccagcctgggcaagatggcaagaccctgtctctgcaaaaatttttttaaagttagctagtcacagtggtgtgtgcctatagtcctagctacttgggaagctgaggcaggagaatcccttgagaccaggaagttgaggtggcagtgagccactgcattccagcctgggtcacaaagcaagaccctgtctcaaaaaaaaaaaaaaaaaaaaaaggactattgtctaaattatacaaagaactgttaaaactcatcaatgaaaaatagggccaggcatggtagttcatgcctgtaatctcagcactttgggaggctgacgtggtggatcatttgaggtcaggagttcaagaccagcctggccaacatggtgaaaccctgtctctactaaaaatacaaaaattaggcctggcgtggtggctcacgcctgtattcccagcattttgggaggccgaggtgggtagatcacaatgtcatgagttcgagaccagctgggccaacatggtgaaaccccgtctctactaaaaaatatacaaaaattagccgggcatggtggtgtgggcctgtaatcccagctactcggaaggctgaggcaggagaatcgcttgaacccaggaggcggaggttgcagtgatccaagatcatgccagtgcactctagcctgggtgacaaagttagactctgtctcaaaaataaaaaaatttaaaaaattaaaaatgaacaacacaacaaaaaaaaatggacaaaagatctgaagagacctgagtgaagaaaatatacaagtggcaaataagcatatgaaaagatgctctgcatcatatttcataagggaaatgcaaattaaaatgacagtgagataccaccactaaataggatggccaaaatccagaacattgacatcaccaaatgctagcaaggaagtggagcaatagaaactcttattcattcctagtgggaatgcaaaatgctatacccactttggaagacagttggtagtttcttacaaaatgaaatgtactcttaacatacaccacagtaatcacactccttgatatttacccagataaactgaaaacctatatctactcaaaaacctgcacacagatgtttatagcagctttattcataattgccgaaacttcgaagccaccaagatgtctttgaatgtataaactctggtacatccagacaactgaatattattcagtactaaaaaaaaatgagctatgaagctatgaaaagacatggaggaaactgaaatgtatattactaagtgaaagtagtcaatccggaaaggctatgtaccatatgtttccaagtatatgacattctggaaaaggcaaaactgtggagatagttaaaggttcatgggttggggaggagggagagatgaataggtggagcacagaggatttttagggcagtgaaactattctgtatgaaactacaatgatagatatatgtcagtatacatttgtccaaaccaagagaatgcatagcactgagagtgggcactaatgtaaactttgccctctgggtaacaatgatgtgacagcataggcgcatgggttttaacagtgtaacaccggtgagggatgtggataatgggggaggctgtacttgtgtggacacaggggtgtatgggaactctactttccgctcagttttcctgtgtacctaaagtttgtcttagaaattttattaataaaaaaatggcagctatgaggcagtagaacagtatgttcaaagaatatacatgaaattctgtatctaaaactatccttcaaaattgaaggtaagataaagacattcccatataaacaaagactgagataattggtagattgtagatttgtccttcaagaaatgctgtattaaaggaagtcctttaggctaaaaggaaatgactccagacattatcttgaatccccaggaagagggccttgtgagagaaataagaagagaagacatgtatctgtgaagaaaagtgggaaatctaacagtgggtgaaatagattgattacttactgtatgactgtccgaaagagacacagccgtgtcctcaggaaatatttgctaggacgcttggtaaaagaaagtgatagggcacctgctaggctatttttaaatgaaatcatagatgttgggagtggcacagccttctcagctcatgacactttgcttcccagtcagttcttcccacatgtgcccttcctcctctgtgtttgctggcattaaaagtcagtgtactaaacgttttcaggagagttgttatataaactttcaaaacctcccttagaataaagagcattttctagttaaatttcacaaaaatgtttttcacacagctctaaaaataacttggaattcagggtgagccatcatcctagataaattacagtaaggcacatttgtctgagagaaagggagccaacagagacatgatgatttatctaactttgtgaggaaaccaagacaggaatttgttagaattcaaagtattatgatttcaaccatgagactacatgaaattaagcaacatttaatgtttaatccctagcgaatgacatacttttgctctgggatgtgatttgtttgccgtaattcgttttagtgatattttgctgagataaagctgcaggaatgtttgcttttcttatggcaactggcaaatagttaaaatggactgtgagaacatttgttcttcaggattctgtttaatactgagtgtaggcaaataaaacaacacatctgggctctgtttttttctgtaatctgatggtattggattagattatttccatgatacaatcttattcaacaaacatttatgaagttctcaccacatagatggtgtgggagtcagaataaaaggccagaccctcagagaactgctgtcttgggaggcacgtggcagtgaagggaaatcattgtgatgttttgtgagatgctatggaggctacactgaaaaggaagtgattaaccctgtccagatatggagggcagggttgctgggtggcttgaaaggtttcagggagatggtgcccaagcaggacttgaagattggataggagttatcaaagaggacagcaggcaagaacgaacttctagagacccaatttttcttctgctttctacttatcaaaaagtatttagcattgagagtgttttctataatgaaggctcttaaaattattatttaatatttcttgaacatgcttggtaccatttaaaatacaggtttaggccgggcacagtggctcacgcctgtaatctcagcactttgggaggctgaggtgggtggatcatctgaggtgaggacttcgagaccagcctggccagcatggagaaaccccgtctctactaaaaacacaaaaattagctggttgtggtggcgggcacttgtaatcccagctactcagaaggctgaggcaggagaatcgcttgaacccgggaggcagaggttgcagtgaaccgagatcgcgccactgcactacagcctgggtgacagagcaagactgtctcaaaaaaaaaaccaaaaaaaaccaaaaaacaaaaaacacaggtataatctaaataatcaagttaaattagaaacggctttggtacattgtcaggacactagggggacatttacttctggagtttttttcagttctgtgtattttacttcttgagtctttgtgctgaccactctatttcagtgaattgagttccctttaaaaagcatatcagaaagtaaaactgcttttgttgtgtttctattcagctacaaatctcccagagtctgcttgcagtgaagtgttagtaatgaggtctcttctgtccccacttcaatgccgccgtgaagaaaatcccatgaaatgttataaggcattttagtggatggaaaagcaatataaatgaccagattacctaggtgcttaaaattgcatcaggtggcctccttgtagcccttgccacatggtaattaaatgtttgttactgattgttctcctcactggcttagtccacacacacagtggcatcaggggctgggtcttgttgattcactgatatccaagctccacatccttagggtgtgatcacagctcactgcagcctctacttctgggtctcaagtgatcctcccacttcagcctcccaagtagctaggaccacagacatgtgccagtatgccctgctaatttttgtatttttggtagagacggggttttaccatgttgcccaggccagtctcaagctcctgagctcaagtgatcctcctgtcttggcctcctaaagggctgaaattacaggcatgagccacagcacctggctatgctgctcaatcttgagtgcagatattgtcaattgttgtgcttttttttttttttttgagacagggtgtcattctgtctcctaggctggagtgcagtggcatcatcatagctcactataacctcaaactcctgggctcaggcaatcctcccacctcagcctcctgagtagctgggaccacaggtgcatgccaccacacctggctacttttttcactttttttatacagacggggtctcactctgttgcccaggctggtctcaaactcctgggctcaagcagtcctcccgcctcagcctcctgagtagctggggattacaggcatgagccactgggccagccttgcttaattaagtttctgaaactgatgcctgtagatagttcctcttagatactctagttgacgctgtagcatctccttttaaactagattcctgaactcctagatttctgacctcatatttatgttggcatcttgtctgtcttgttgctgttgttatatgtaatttttaaagacaataatctgatttaggagtcacaaaccagcagtggcctcggccaggtgcggtgttcggccagcacagcagtttgaattgttttgactttgaatgaagtcttcaggcaaggcttgtactttggacagcccactactctgtgttgtttcacactgattgtttctttcattatcacaattatttaatttttgtgtttctttgtatattgtcagtcttccataggggctgcctccatgaggtcagacagcttttctccttcgttcattgccctccaccccagccctagcccagtgcctggtaccagagggcacttgagaagtgtagttgagtggatgagtgcacgacatccaggatctgaggtgatccctggtgtgggtgtgaaggaatacggttggtctttctaccaaacatactcaaacatgacgagcccttaaagctgccagcttggctgctattgcttggaacgtttctgaaatcctctctgggaattgccttttttcagtcagtttatgattcaacagcacagttgttcaagattttcatatttacaaagtgctttcctatgcattttcctattggagcgatcatccccattctgaggtgagtgtgcttagtttcaagtagtgaatgaatctgcctgtgttgcacagcaagtatgcagcatggtggtcttgtccccctcccccatgctggcttggtgttttctcttcttcaccaccacagtcagtgccttgtccagtttctgtcaggggtgggtgcggggggcctggggctctggtgtgttttctaggaaagagagtgacattattccagtgtcttctggtaacactatattcactttttttttcttttttttgggacagggtctcactctgtcacccaggctggagtgcaatggcaccatctccacctcctgtgttcaagctgtcctcccacttcagcctcccaagtagctgggactacaggcgcgtgccaccatgcctggctaatttttaatttttggtaaagatggggtttcgctgttgcccaggctggtcccaaacttgtgagctcaagcagtccacccatcctggcctcccaaaatggtgagattacaggtgtgagtcaactgcgcctgatctaaattcactttaagaagcatattaaggccggacgtggtggctcagcattttgggaggctgaggtgggcagatcacaaggtcaggagttcgagaccagcctggccagtatggtgaaaccccgtctctactaaaaatacaaaaattagccaggtgtggtggcgtgcgcctgtagtcgcagctacgcgggaggctgaggcagaagaattacttgaacccaggaggtggaggttgcagtgagcaaagatcgcggcactgctctccagcctgggcaacagagcaagactccgtctccaaaaaaaaaaaaaaaaaaccacattaaaaaccaaaattgtgtgtgtccaagttcctaggtagccatagtaagtgctataattgataaggagggctttaggccataatgaacagacagacttggcgcgggctctgcctcctgttcattgtcaccgcactcctgtgccatcatattacagggcccggggctgggctttggcacctttctccgccccccctcacaggattgccgggaagcatgtgcttggcatcttactggagagcagagctcacttcaatgtggctgctcttcccaggattgaacactcaggagcctggtctgaaatctccagccttccttcaggttttatttttactaaagccagcctgtactcttttaaaccagggagctgaaggctggcttctgaaaatacaccccacaggccactctgccgtggcttgttcaggcattccagggagggcttgctgacctgaaggtgtcctctggcccaggtcaaaagaccagagaagacactggcgccaggaaccgccactggcaaggtagctgccatctgaggtaggatattgttcttttttttttccagtcgaaggcggccttaatgtggcttctcagacatttgagaccaaaaaaaaaaaaaggcagtttgaccctgcctttactttctgaaaatgacagaagctttcagatatatttcaagatatgggtcataagcatgacccatagtttatgtcaccttaaatagagcagctgattagaactggccattggttataaaataaaagagtacgtgtaggtttgtgggagcaggatcctaactgctttagcaatactaagccactccttgccgtgtgatttcagtgtctttccttccagttggaactcctctctgccctttagcctgattttcttgtgtgtaacatggcaaattatttcatggctaatccttcttacagacctgaaattgttctttttaaaaaaaactttggtgggttttgagatcccctcctttgattctcagatgtggctgttagtagtttaatttctgtatgtggtttctgagtagcttccaacaacctatttttgttaacagttctttaaaaaaaaaaatgctcgagagaaaggaatcttaggaacggattccgtctgtgaaatgcaagggagaattttggccaaagtagaaggaatggaatggatgacataaagggtgacatttgtgctcagagttgatttcttggtgatagtctcatgtctaatttgaggttccagaagccctttaaagggtggatgagctgcacaaatggatgtgagggagttacacagtggtgggttcagcagaaagtaaaggagcagcagaatcacagagagaagccccgaactctggctgcccgggcccaaggaaccctcacccttagcgggactttgctacctttgcactcttttaacctgggtctagagctcatggatctggcaagggatgaaaatataagcagacagtattaatatgtgagcccctgagctctctcccttcctcacgccagttcgtgagtctcatcagtgtgagactgtgtttcaggtctcttgcccaaggactaagagtgtgactatgactgcacacattccatgtgtaggtggtgccctctgcttccagatgccgtgtgcactatggtttctatttgaggggctctcaccttctttttctggcttcactctctctccccatgtctctgtcctgctttctgccatggctcacagtggtgctagacagactctgtcccttctttctacaagctgatctccaaatgctgaaaatcgtgagccagatattttttcccagtccctttttataccatcaatcttgccttctcagtccatgatctggctatatatctgaaactagcagttaataaggattttggtataaaatgcatgattgataaatatattaaagtttatacatatatataaatccttcttgtatgccattttcaaagaaaacaggcctccctttgaccttgctttatgtagatttatttcctaatctggaaatgtggccagctagaacactgttcctttcttccactgtgaagctgtccttttagctggtagaaagccctggacaccacagcaaggtggtggggctttccatggctagctctcatggtcatcctgacttccaaagacaagctaggaaagtgttggcacagctgtctctaagaacccaagaaggcccagcagtgtggccacatgccctgcatagtggaagaactattaggagggctttcagagtttgaaaaactctggaaagagtcgggattatcaatatgaacaacttcatctagtcaggaaagttatgctggaattgaacctgattctcagataaatggctcactctggggtgtcttttcccaccatggtcattctttgttagcaggggagagttggcactggattttgttttttgtttgcttttgagacagggcctcactttgtcacccaggctggagtgcagtggtgcaatcttggctcactgtagcctcaacttcctaggctcaagcaatcctcccacctcagcctcccaagaagctgggactacagacgtgcactaccatacctggttagtttatgtgttttttgtagagacgggatttcaccatgttgcccgggctggtcttgaattcccaggctgaagcgatccccctacctcagcctcccaaagtgctggaattacaggcgcgaggcactgcgtttggccttggcactggcttttaatttgctttgcattctgattcgatagcactttaccagactgaatgcagacatgcgctctccccacagacagcggcccgggccaaggatggatcccattcacccggcgccatgtttgcctcaggcaaagtggtctccagggccaggagaccaaggctggcctgtgatgttgtgtcaggtgctcaaggaatcccagaagtgtacaagacggtgtgtagttttcgctcttttcttcatgtcatggattgctggcttgagttttaattaggttgcatgaaagtgcaatttgttgggaactttaatcatcttccactggggagccttgctgggctggtttattttcatcctgctcctccctgggtgtgaagacggggttgagggacattttagtacctgtctgctctctcctgctttgctggccttgataaccacattttctaacacaaaacttgggacatgagagcctgacttctgccaatgttgtggagttttttcctatttgttaatttgattaaactgaaaggtttatgaaaatatagaagttaaacaacattggacacttaatacatttaatgagcttcctttatttggaaagaaccacacttcacaagccaggggtcccttcagacagtcttgggagtcggattgctgggaggtgaggtcctgatccaggaactttgagttaatggtggtcattatgatgctggtggcagctgtgttccctctgtgtacagatgaattcatccaacctcataacaaacccaggagggaggtcctctcacaacttcagctcagaggcgaggacactgaggcccagggcagtgaggcccctttgccaggctgccaagtgactgggccagggtgtcacccaagccaggctggcttgagggttcatcctcatgacccctgcactgccgctgttgtgctgcagttagtgtttttcaagtggtctctgagttttgagaagcgacaggctgcatacttggctcttgacccccatgacctcggtggcactgtgcctcagccccaggttgtcaatttgaaattgggtggacttcacaggcactggcctccaggggcccacggaggagtgttcggaggggtttccacccaacacgcctagtggggctctgggtcccggccccagaggctgagccctactatccttccctgagctgaggcccccacccctttcatacctcaagctcatcctgggcagtggctgggccctgggccattctggacaaggcagggtggtcctaccctgagacctacctggtacaaagacctgggattgcagtgagaaaaaagcttttaccaaatagccatccagccgggttgaactcttcccaagcccccacccctcaaccagcttattacatgcaagttttaagctatccttgcctggagccttctcttgccttttgtcaattgctgtaattttctggtaaagctatatcaacaaaatggcaaccattcctgcctcccactgtttatccctccttcccctaggaaaccctcccacattccctgttttcaggatcttggtcccgtgcaggactccaggcagcacccacagaaccctggagtggcacaggcctcggtgcctactctacagctttcctgagcacttctcagattccacacaaagggtccttgggacccagcatagcctgcaggcaagaacacctggtcagaacttcctcttggggcagggatggtaccagtagtgcctggtgaaaagcttggtgctttagataccaccttaatccccagttcatacaatggaggcttggcatagtgtagggcaagagggagctttatccatgcagcagatagtagctgaggtgttttcagaggtggattaagtggcagttgatgggaaactgtcatttttacagtccaagaatgtggctgttttttatggtggttaagaattcaggtgtatctggaaaagcaggtgaaaaagtaaatgctaatctagttcagttgacagttccgttgcagtagaatcctcttgtagggggcaatttagcatagatcaggacagccaccctgaacatgaacttcaggatcaaagcgacttggtgcatagatggatgtgtgttgggagtccacagtgttcctggcttcactctggcatccagagttgatgtcctcttacgaaaggaagcagaattttttttttatatgtgggcttgagatgggatattaagtaggtggctgagggttttacattattgctccaagcttatgaataatttagagctacagtctggtttgccagaactctcttcttggattccagcctcttccttcctgagaaggattctgtgctcgtaaaccacagccctggaggtggactcggggggggccttttgtctcatagactctggctcgctcgtcaagtggccttccagggcattgcttcccagcgacagcacatggtgctcaccacggtcctcaccagctcctcctcagccttcctttaaccctgtgtccccctcttatctcctgctttgggcacaggaggacaggtgaatgcggaggaatgggggaggttcaggggaaataagggcagatggggaaaaacacacattttctaagaatcaactgcacactgttgcacagacactcatacagcctccagatttcatggctcactggggaatgctgggcaggaacatgccacaggcacagcggggcagcacgctcaccggccggagcccatgctggtgcttggggcagggccctgcactgaatcccctttgggtgtctgtgaggcctgtggtcagaagtccatctgtggccctcactgtaacagtctaggggctgctccacccagaaacgtccgtcctctgagtgtctgctctgaagaggataagaattggtacgacttcctttttcctttcctcaaaaaacccctttctagtttcacaagtattcagggattgaaaatgaaaacaggcattacttgaggtaaggccaacacaggtttccgaaggagaggcaggtgagtactgacacaccacctcttcctgtaacactgtgggtgactatgtcctaggctgaatggcaatctccgcttgttccctgaggggcagcatgaggcctgtggcttttctgtccgctcatgtcagtactgagaggaagaaagttctacaatgctgaacagtcggccgagggtgcagggcctgggtcaatgcttgctagggcttagagctggagtccacagagggagatctgggattcatatcagatgagaggaagagcctaggaaagtcccctgaactctgctactttgtcactggtgtgtttggttttggttcttccaggaagagtctgccgaaggtgaaggccatggacttcatcacctccacagccatcctgcccctgctgttcggctgcctgggcgtcttcggcctcttccggctgctgcagtgggtgcgcgggaaggcctacctgcggaatgctgtggtggtgatcacaggcgccacctcagggctgggcaaaggtgggtcctggaggcagtgctgccagggggcgggggtaagtcagccagggatgaggagcggcccagctgcacagggaccaccagcgcaaatgcccgaagcggcagcagaaggccagataagggaagtgggccggatggcactgtccttggtacaagtggaaaaagcaggagccaaggcacagtgagaaatgactcagcgtcagggtgggaggcaagtgtgagagaagcagcctggccccgggggtggggtggggtggggtgggatgggatacctgcccctcacagggcagccctgctcagcctcagttgcttgctgaggtaggaattttatgtgaaatatcccaatttccaaatatggacagctaacttaaaacgtgtttttacctctatgaggaccaaatgaaacatgtcctttcctagattcagccggggcctctggttcacagctttggtgcatgctttctctgggccttgccatcccaggccaggcccccagctgtcccctcagcatggtctagacaaggtcaaagacagataaatggtgcctcagctgttccagggtctccaatctaggtccattccaacccagtgaacaccatgagcttctaagtctcaggaatggtgtaccgggaccctggcctggagtgtcaaaacctgggttcccccttctcccatttctggaagcctctgagttacagggctccattgttttcctgccacacacgtatattgacttggcacgttgcacatgcacacaccataccatctgccatccacgcttactctgagttccatggaagaaagctgaggagttccctgaattgtggtgaccccacccgctgctacatcttctggttggtgatagctcagctggagctgatggagcacctgctaaagtgggaggctctgggtcaggttctagaacaaacagatgaaagacagggtcccttccttcaaggaggtcacggtcgtctgttgtaaggagaaaggcaaggacttatctcaatatattgccattgcagtaacatatgctctcaaaccagcctggtggcaacaaggcacatgtatatgtgctgacttgtgctaagcacttttacatgcatgatctcactgacttctcacagctaagattcagagaaggaatgactaggacttccagccagaaggtacaaaacctagagtcaaacccacatctctgtctctagaactcacagtctcaaagcttcagcaggggagatggccaggtagaaggaataggtgggctagtagacagaacattccagacaggcccagaggtaggggagaagcacggtcctgtagggacttatacagttgggtgttgcatgaacacagagaggcaggtgggtctttgtggtggaagtggcttgcagttggccaggggtggcctgggaaagctttagggagtatggattcatttgtgcaccactgtggatgttaggtgaggtctccaggggtgaacaccatatctgtcattggatatccagacctttgcagggacagctgtctgcaggccctttgccatcgtcagtcctctgaccttactcagttactatatatagggtggtcagcagccacttctcttgagctcaaagagaagcattttgtgaaagtccttgaagagcatttgagggctggcagaggtggagctctgagtcgcaagtgctcccatccatgcatgtttgagaagcatgctgtcatcttcattctgcatctcctctcctgacaccaagactatgaagggaacagaaaatgtcacggaggtcaccagacctgtctatgtatcataagatgtcaggcccttcctggattccagtcactgcttatattctgccccatttaactttttgggaacaagagtccctccatccagataaagtagggcaggttcttaactggccatgtcaagtacagccactgttgatgccaccaaggacgttctgatgttgccttgcttctgtgaggaggcagagctatgttgtcctcagtggctctgcctgccgtgtcagccacccggaaggtttggagttatgcaacgagtcttcagttttccgtgtttctcctatcttgtctcttgttttgtgtacttaagcctcttgagcttgtccttgtagaatagtgtgggaccactgactaaaggaacagaacgttctggatatctccttcctccagctttagccacagggctgtgcacagctctgttgatttccagccaggcgtgccagcggcactggacagtcatctgcagcccttcatatatcgtaccttggagttgttttccttggaccctcctaccttccaatatcagcttttcaataaatgaaaatggaatccttccaatctgttgttttcatttctgtcactccctacacaaactttcatttcctctctttttagctttgctaggaagcaaaactcaaacaggtttgaggcagtcatctccccaaagctgtttagactccagcgggactcccacctttgaagggttctgtgtctgcaccctttggtggcacctcacaaatgtcctatgtattggtcaggacaagacaaaatggggtgaggaagccagcagggcccaaggttcctagcctttgggaatgatttataaaccggatgagcagttctagcctcaggaatgctggcatctggcttggagtgcagccatcacccccctcattcctgtgggggctctgctgctctgctgagaagcgcaccagggaggcagggttggggcgctgggaccaggcctcactacccagggtgggtgctctctccgggcttttgccctttgttgggatgagccaacgaacacaccaacctcacctccttcaaagaagatagtgtgtctagattgagtctacttagcacctctttcccgaagactgtcgggtgtatggagaggcgcctgggggatgagcaaatgctgtgtggggagctgaacaagaagctgtggagcacacggaggcttcacaccatgagacagacgtcagggagccttccctcagacctctcaggacccctggtgctgaaggagtttcttctcctcccatgttttgaacccatctagctttaaggaagtttgacacttctctaagggcaggcctgttcagaccagtacacaccgcctgcccctctgacctttccttcccagctgaggagatggcagccctgatcctctgaccctgcagtattggcccatcaccacatggctaccagagatggaattagcctgcaaaggccattccctttcatgaaccaggagctagggtgccacctaatcacctgggcctctaagattcggtctggaaccaagtcagtggctcactggtgtcaggtcagggtcagccaggggccaaggtatcctgtgcagatctgctggtgagcacttaagggagactatgcctcaggtgaggacaggagtgcctctttaaaccagcatgtggccaggtgcagtggctcatgcctgtaatcccagcacttttggaggcccaggcaggaggatcgcttgagttcaggagttctagagcagcctgggcaacatggcgaaacctcatctctacaaaagttagccaagcatggtggcatgtgcctgtagtcccggcaacttggaagcctgaggtggaggctcgcttgagcctgggaggttgaggctgcagagagccatgatgacactactgcattctagcctgggtgcagagcgagaccctgtatcaaaaaaaaaaaaaaaaaaagtaaaaaactatgtttcagttttcatcatcagtttttagaacattattatttacacatatttttattttttgagacaggtcttgctctgtcacccaggctggagtacagtggtgtgatcatggctcacttgacttcccaggctcaagggatcctcccaccttagcctcctgagtagctgggactacaggcatgcgccaccacacctggctaattttttattttttgtagagacaagattcctatgtttcccaggctggtctcaaacttctgggctcaagcgatccttctgcctcagcttcccataatgctgagattacaggcatgagccactatgcccggccagaacatttttacaaagtagttcagaaatatggccaggcacagtggctcatgcctgtaatctcagcattttgggaagtcatggcaggaagatcgcttgagcccaggaatttgacaccagcctgggcaacatggcaaaatctccatctctacaaaaatacaaaaattagccagccatggtggcgagtatctgtggtcccacctactctgcaggctgaggtggaaggatcactggaacccaggagttcgaggctacagtgaactataattgtgccactgcactccagcctgagcaacagagtaagaccctgtctctaaaaaaaatatttttaataaatagaaatacaaaaatgacaattgacaccgctgtagtgctgtttatcaaacactgtggtaagagattacctaccttaactcattcaatctcacggtcacaccccgagggactgaatgagttaaggtaggtagtctcttactaccgtgtttgatagataaaaagcatcctaaataagaggaaagtcagaaacaaagaggttctaacttactggagttggaagtctagctcaagtccactctcttggctgctgggctgtcctgcttttcataagctgtatgtacatttttggggcactgaacatttacataggatatgttgcaggggagggtaagcaagaagcaacgacgccaccctctgcctcctctcctcccatcactccgtttcctttctgactcctcatagagtagtcctccacccccagttctcatggtttaccctgctgcgtccagggggtttctcgtcaggccctcctgcttagccacaggagaattacctgtgacccttgctgggccccccactcaaggctgatcacggccttccctgggatttgatcagagctgggaagagacaagacaaaactgtgcatgtgagctctggggcctgcccgcgtgtgagagcacccaggcacgtgagagcacccgggcagccagcacttgggtccctcctaggtttcggccatccggctctcctcttcattcttgaacttccccacaatccctctggcaaattctctttttgctttgccccagtgtgagtttagtttctgtttcttgccaccaaaagaatatagagcacgtgtctgactagctttggactgtccctgctgtggtcgtagttgaagtccgcatcgattgttacctggaatagtgtggtgggcttggtggagcctgctttcctccagtgtccccactccctcccgcccagcaggactgagccttttcaaaggcaggcacccttaatagtcctgcgtgtggcaggtgcttgcgtgcactgacttgacccctccccagccagtgaggttgttagaccctccaccttctgtcccatctctatctgcctgtggcccttcaggcactctgctccctctgcctcaagcactccctgggaaacagcccatcagatctgggaagggcctcggtcccctgccccagcttttctacaggactgtgtgagtatttccaggagagctgtgcctgggtagtgccaccacacagtcttggcagggcacagcaccataatagctggccctcattgaccttgccaatcaggacaagaccctgcctgagtgaccttggtgagctccctcagctgtgaagataggtgatgctcacagctgatccaggtgaacaggaacatcatggggtgttctgagcatgatacttaacacatctgtccacctcggccctcctttctctttgccctgtggatgtttgtagcactgggcgtgagcccggcattgggccctagctcccagcttcatgctgggccacacagcaggggccaacacagacctgtgaagggtgtgaagcagcaaacagcaacgctgggtgaatttaaactgaacggcactgaggaagaatggctgtcaaggctcttttctcttcccttagaatgtgcaaaagtcttctatgctgcgggtgctaaactggtgctctgtggccggaatggtggggccctagaagagctcatcagagaactcaccgcttctcatgccaccaaggtgagccaggggcgtgctttccatggggaaggagtgcaggccgtcttctgtaggcactgaggagatagtggcccactcctggactgctgagctgtaggacatccatgcgtcacactgtcccagggaaggcagcaggtctccatagcgaaccgggcccactgcatagggagagagaactgtccagtggtttacatcctgatgcccctactggctagcactgtgagttgagaaagttctcttttctccctttccttttacctggctaagctctacttactgggtgggagtgggggatggtgataactttaaaaggtgtttttttttttttttttgggacacggagtctcgctctgtcacccaggctggagtgcaatggcccaatctcggttcactgcaatctctgccccctgggttcaagcgattcttccgcctcagcctcctgagtagctgggattacaggtgcacaccaccacactcagctgatttttgtattttttgtagagacgtggtttcaccatattgaccaggctggactcctgatctcagatgatctgcccgcctcagcctcccaaagtgctgggattacaggcgtgagccaccagtacagcccttgttttattttcttaggctcttgctctgtcacccaggctagagtgcagtggcacagtcatagctcactgcagccttgaactcctgggctcaagtgatcctcccacgtcagcctcttgagtagctaggactataggcatgtgccaccacacccagctaaatttttttttttctacttttatgtagagacacggtctcactatgttgcccagattggtcttggacttgtggcctcaagtgatcctcctacctgagcctccttattgtggttttgatttgtatttccctaattaaaaatgatgttgagcatcttttcatgtgcttattgaccatttattaatctttggagaaatgtctattcaaggccaggcactgtggctcatgcctgtaattccagcactttgggaggccgaggtgagtggatgatcacttgaggccaggagtttgagaccagcctggccaacatgacgaaacccatctctaccaaaaagtacaaaacttagctgggtgtggtggtgcatgcccgtagtcccaactactcagaaggctgaggcagcagaatcacttgaacccaggaggtggaggttacagtgaaccaagatcgcaccactgcactccaccctgggtgacagagcgagactctgtctcaaaaaaaagagaaatgtctattcaagtcctttgcttgtttttttaatcaggttgttgtttgttgttgttgagtttaggagttctttatgtattcgggatattaatcccttataagatatgtgatttgcaaatattttctctcactcagtatcttttcactttctttttttttttttttctttttgagatggagtttcactcttgttgccgaggctggagtgcaacggtgcgatctcagctcaccacaacctctgcctcctgggttcaagcgattctcctgcctcagcctcccaagtagctgggatgactggcatgcgccaccacgcccggctaattttgtatttttagtagagacggggcttctccatattggtcaggctggtctctaactcccgacctcaggcgatccacccgcctggggcctcccaaagtgctggggttacaggcatgagccaccatgcccagcccactttctttttttttttttttttttgagagggagtctcgctctgtcacctaggctggaatgcagtgacacgatcttggctccctgcaagctccgcctcccaggttcaagtgattctcctgcctcagcctcccaaatatctgggactacaggcacgcaccaccacacctagctaatttttgtatttttagtagagattgggtttcaccgtgttggccagaatggtctcagtctcttgacctcatgatccacctgcctcagcctcccacaatgttgggattacaggtgttagccaccacgcctggccaagttttataattttaaatcttacatttaggtgattgatccatttgagttaatttttatacatggtattaggtaagagtccaatttcattattttgcacgtgattatctacttttcccagcaccatttgttgaagactgtctttcctcattgaatgggcatccttacaaaaatcaattgattacatatttgaagtgtctatgtctaggttccttgtgccattcagttggtctatatgtctgtcttatgtcagtaccatactgggttttctcccccttagagggacggggtggagcatgagggtaggaagggggaggcaagggggaggaggaggggaaggacccatactgttttaattgctgtagctttgtacaagttttgaagtgaggaagtgtgagtcctccatctgtcctttttcaggagtgttttggctattcaaggcccattgtaatcccatatttgtgcaaaaactgccagtgggattttgataggaataacatcgaatctattggtccctttggggagtactctcacatcaacaacacggtcttccagtccatgaatgcaggatgtctttccatgaacttacatcttctttaatttctgtcagcagtgttttacagtcttttatctccttagatttattgccaagtgtttgtcttagtctgttttatgctgctgtaacaatagcagagactgggtgatttttatttttattttattattatttttagagacatagtcttgctcggtcatctaggctagagttcagtagtgcaatcatggctcactgcagcctgaaaatctcaggctcaagcaatcctctgcctcagcctcctgagtagctgggactacaggcacatgccactgtattgggttaattttttcattttttgtagggacagggtcctgctatgttacccaggctgatctcgaactccaggcctcaactgagttgcccactttaccctcccaaaatgccaggattacaggagtgagccactgcgcctcgccggactgagtaatttttaaagaaatctagttttcaaagtctggaggctgagaaatccaagttagaggggctagcatctggcaagggtctggtgtctggcaggggccttcttgccacatcttaacatgtaggaaggcatcacatgggcgagagagagggaaaagggctgattttatcctttgataaggaagctcccacaataacagcattaatccattcatgaagttcccacctttcaacactgttgcattggggattaagtttctaacacataggttttgggagacacattcaaaccatagcatatttaatttttttaactgctactgtaaatagaattgctttcctgattcccttttcagattattcattgtttgtatatagaaacacagctgatttttggatgttgctcttgtaccttgccactttgcttaatttgttaattaactcttattagctttttgtggatttattggaatttcctatatatagaatcatctgcaaacagaggtagttttactttttcctttccaaattgggtcacttttttcttgtctaattgttctggttagcacttccagtacaatgttgagtagccgttgtgaaagcaggcgtccttgtcttgttcctgatcttagaggaaggctttccatctttttccactgagtatgttatctgtgggtttttcataaacaccctttgctgtgttgaggaatttctggtctagtcctagtttattgagtatgtttaccatgaaagggtgttagattttgtgagatctcttttctgcatcaattgagatgatcaagtggggtttttccctcgttctattaatgtgatatattataatgttcaattttcttttttttctttctttttttgagaaggagtttttgctcttgttgcccaggctggagtgcaatggtgcgatctcggctcaccacaacctccgcctcccaggttcaagggattctgctgcctcagcctcccgagtagctgggattacaggcatacgcctccatgcccagctagttttgtatttttagtagagacgggggtttctccatgttagtcaggctagtcttgaactcccgacctcaggtgatccacccacctcggcctcccaaagtgctaggattataggcatgagccactgcccccggccaattttcttttttttaatttaaagagacagggtctcgccatgttgcccaggctggcctcgaactcctgggctcaagcaagcctccctcctcagcctcccaaagtgctggggattacagccatgagccactgtacctggccatgattgattttcctatgttgaaccaactttgcttgcattcctaggataaatcccacttggtcatggtgaataatccttttaatacgctgttaaattcaattcgctggtattttgttgaagatttttgcatctatattcataagagatattgctctataattttcttgtgatatctttaatctggctttagtatcaaagtaatgttggcctcagactgaattaggaaatgttttctcctcttcagttttctagaagagtacaggaaggactggtgttaattctcctttaaatgtttggcagaattcaccagtgaagccatccggtccaggacttttctttgttggaaggtttttgattactgatccaatctctatctgttagaagtctcctgagattttttatttcttcttgagtcagtttaggtaatttgtgtttttcaaggaatgtatccatttattctagtttttctaacttgttggcaaataattgttcatagtattcttttataatcatttttataatctttataattttttttatcatctcatcatttctgtaaagtcagtggtcccactttcatttctgattttagttatttgtgtcttctgttttttccttgtcattctagttaatgctttctcaattttgttgatcttttcaaagaaccaacttttggcttcattgatttttattgtttttctgtattctgtttgtttatctctgttctaatctttattataatgtttccttcctctgctggttttgggtttagtttgctattctttttctagttccttaaaatataaagttacattattgttttgaggctaagtgatccgtgggacacatagctcagatggcctgccactcagaaagtgaatttgtatctgttgtatttgaccaggtgcagacacacaagccttacttggtgaccttcgacctcacagactctggggccatagttgcagcagcagctgagatcctgcagtgctttggctatgtcgacatacttgtcaacaatgctgggatcagctaccgtggtaccatcatggacaccacagtggatgtggacaagagggtcatggagacaaactactttggcccagttgctctaacgaaaggtaacagtcttgagaaaagagcagtgataagtgatatgttggcattctttttacttcacttggatccttttcagctaaacgttccccatctccatcctctctgttgccctggagtgggtgttaggtgttattgttacagtttgggtatttgctttatagcttccaatcaagatgttctctttagtgacagccacatttgtgcagcattacctacatgtctttttcatggtgcctgcaaacccctacaaggtggggatatttttatgtcccaccatggatttcagtccaggggagaggctccagcaggaaaagggaactgagctaaccatttgcagtgacctctgtccctgtttccttgcctctctcctctctcctgctggcctgctggcactctgctgggcataggaggctggaagttccaacatagtcctctaccctaaggggttttcaccattctccctcattctgactaaatatcaaaagcaaggtcgccttccatcagcatcgggtgcaatgactggaagtagggcgcttgcctaagcctctgcatctgtcctcagcactcctgccctccatgatcaagaggaggcaaggccacattgtcgccatcagcagcatccagggcaagatgagcattccttttcgatcagcatgtgagtacttctctctcccacaaaatgcttggctttattgttttttcctgattataaaaataacacatttactatctagaatttagacattgtagaaataaactatccagaatgcaaaggcacttgagaatgtgttctccagagccacatgcctgggatcaaatcccagctctactttctgtcccctgtgtgaccttgggcaagtatccccacttctctgtgccctgccctcaagtgtaaatggagacagcctcagtcttagcccggaggactgctgtgagcgctgtgcttggagctgccccagacactaagcactaggcatgtgctagccactcctactgttaagatttttagcttgtcccacagatataaccatgccatcactttggggcatatgcttccacagttttttctacgtataattcaaacatgcaaaaatggaatggcattattcatattgctttgtggcttgttaatctcacttaatgtatctttctacatcagcatgtatggatttacctcatcctttcaatacagtaatccattgaatgagtgtgacataattgatttagccattttcctggacacttgaggattttttttccccctcagtctttgaccattagcagcagtgtgctgtgtagaacattctcaaatatttatatctctgggcactcaaatgggaaggtttcaataaaaagggttttaaggtaatttcacaaactgtcctttctttgcatcatctcccgaaaggaaatactgcctataccagcctcatctcctctcagccacccaagggctagacccagccacagcctggtcagcaaaggcagggaaatctgagctgctgcagcactttgcaagggcagccccaaacatccagttccatgacactatagggccagctgtgaactgagagtgtaacacagtttattctttcttccaagatctggatcccagctctaccttttggttctggttgtattttcttggacacattacttaactattctgatcctgtttccttacatattagtgagatttacaatcatcatacatgcttgtacatgcatgatttccctgtttgttaatattctctttcagctttggataggacagccatctaaggcttctcaaatggttcaggaaaaaacaattatatatagaatcatcaatgataaagcaaatgagttaaaatgttaataataggtaaatcagggtaaagaggttttttttttttggaaacagagtttcactcttctcgcccaggctagagtgcagtagtgcgatctcggctcactacaacctccgcctcccgggttcaagcgattcttctgcctcagcctcctgagtagctgagattataggcgtgtaccagcacacctggctaacttttgtatttttagtagacacagggtttcaccatgttggccaggctggtctcaaactcctgacctcaagtgatccgcccacctcagcctcccaaagcgttgagattacaggcatgagccaccgcgcccagctggagttctttatactaaattattttcaagttttactttgatttataataataccactgatttttgttgtctggcctgctgactgcagtaaggcatacaatggttggtctccgtattcagttttataatgaccaggctgaatatggagtgcctcttgggcaagttggttaactcagataagtagtggccttctcacctataaaatgaggagaacggcattttctctgtcacactgctaaagtaaagaccaagtcacgtggtccacagtgtccttagtactgggcctcacactggcagggtaagtgatgtggccagcggcgaggtcagcacagcctggctgagaactcacagcctgagagctctggggagacccagctgtcagagtgtagccttctgttttggggacttacatgataacccactcttccctgtccccaagcctgggctgtactcttggaatcatggctgataggagcagtcctctccatccacccacagccaactcatccagcccccagcaactgtgccccaaaccaatggagcaggcccagcaaggcactgcagcaagctcagacactgctgaactgcctcatgtgacttgctgcgacacttcctttctttctgtcttcctgtttccttagctgacggatgccccttctttcctaaggctaaaacatttacaattctgaattggaggaaactgatttactgtggagacgctggtgtgtttcccaggaatgtcattatagggtcactgtgttcccattcagagcaccttttaccgggttgtgaagcccttgctcgagagcaggcacagctctgtttcttgcaggtggagtaagctctatagctcttctagatgaaaagccactgcctggacatttgtcaaaatgagacataagaaggcaggtttggattttttacacccatgaaggcccactgatggggccaattctgtcacttggtaactcactggggaggactaggcagccacagctacatggcaggtctgcagggccagcatgggagctgtccaacctgccaccaggtgaagaaagctacttgcaggaacagtagaataggtaagagttcatttctgtattaaaagatatatatatatatatataaaatatataaaatgtgtaaaatcacatgaatatacgtagaatatatttttaaaaaatcactgggcatggctgcttactcctgtaatcccaccagcactttgggagggtgaagtgggaggattgcttgaggccaggaagtcgaggctgcaaggagctatgatcctatgatcatagctctactccagcctgggtaacagagaagatgccttctctaaaaaaacaaaacagaaggccgggtgcggtggctcacgcctgtaatcccagcactctgggaggctgaggtcggtgcatcacgaggtcagtagatccagaccatcctggctaacatagtgaaaccccgtctctactaaaaaatacaaaaaagtagccgggcgtggtggcgggtgcctgtagtcccagctactcgggaggctgagggagaagaacggtgtgaacccgggaggcggagtttgcagtgagccaagatcgtgccactgcactccagcactcccgcctgggtggcagagcgagactctgtctcaaaaaaaaaaaaaaaaaggaaaaaaaagaaaaccaaaatagaattaaacaaaaattctgggaaactgttagcactgattatctctaggaatggaatttggaagacaggaggactttctttttttgtactttctgtcctttaatgtactatttgaatgttttacccagtagtcattcagttttttttgtttttaacttttatttatttatttatttatttatttatttatttttgagatggagtctcgctctgtcgcccaggctggagtgcagtggcgcgatctccgctcactgcaagctccacctcctgggttcacaccattctcctgcctcagcctcccgtgtagctgggactacaggcacccgccaccaagcctggctaattttttttgtatatttagtagagacggggtttcatcgtgttagctaggatggtctcgatctcctgacctcgtgatccgctcaccttggcctcccaaagtgctgggattacaggtgtgagccaccgcgcccagcttaacttttaacttggaataacttcagacttaaagttgcaggaacagcacaaattactcccatgcacccttcatgcagattccctgttaaccttttaccttatttcctttatcttattctctctctctgtgtatatgcatatataccgtttataatatatataaaactatatgtgtatataatttataatttttttcctgaaccatttgaaaggaaactggagacatgatgctcatttattcctatttcagtttgtttcctaagaacaagggcacagtacacttctcaaagtcaggaaatgaacattgttataatactgtaatcttaaataataaaaccaggttttaaagctgggcacagtggcccacgcttgcagtcccagctgaggcaggaggatcacttgagctcaggagctggagtccagcctaagcaacatagcaagacgatcacaaataaaaccaggttttcaaaacagagagcgtgaatggtagtgaatagttgggcaccaggccatgcccaccccagcgcactcagtcacctgcctctccgtccacatgtgtagatgcagcctccaagcacgcaacccaggctttctttgactgtctgcgtgccgagatggaacagtatgaaattgaggtgaccgtcatcagccccggctacatccacaccaacctctctgtaaatgccatcaccgcggatggatctaggtatggaggtgaggcccggtttctcttttctcctatgaaaatctgtcggtcagccacagtgagacatgctgctcttacttcagtgattctttggtcattttcatttggaagagaacttttaaagtgaaaaaaacttgacagaggtgttggttctagatatggactattgaataatcttcttttaccccaccatggcctacccttagtgtgaacgtcaccattgcagcattcagaacaggacctctgtgggcaggactcaagggctaaaaggaagttgccaagctgaaatgccaacagacttccaactaacccattcgcagatcccgagtccaaggagtattatcggcatcgggattgagtgaattgacctcatggcaagtgtagggtgtttgatggtctgtctctgtcccataggcttgagaaatgactgattcagggccagtcttcaggatgaggccgagtgcagcagtctcagcaccttcatcttgtctcatttggagacagtgcagagctgacctgcagtcaccactcgcgggcagagcagctggccccagcatgcaggctcaggccaagcagagaccagtgtgcccatgatcactggagcccttggagctggtgctgcctccccatgcttggaacagggcctgctcacccctccagtgctgtcctgccatgtcctcctccctgaagtgagctcttggggtttgtgctgtgatgtctgccaggggcctcatggtcctgcgcccggcccagccaggcctgaaccaagactgcccatgtcctggcagcagctgctctctcacacagcaagtcttgttttccccacagtagactctatacagaggcatggggcttcatacagctttacacctgtttatacctagaagataccacttaaaaaattatctctgcggcatttaaaaataagctgtaatccaaaacttcctacttttctgcattaacaaaaacacagaacagacattggtgagggagctcaggcaatctggacaacttaagagtggtttcatatggctaggcactgtggtcaacacctgaaatctcagcactttgggaggtcaagtcaggaggatcacttcagcctaggagtttgagaccagtttgggcaatagtgcaagacctaacctccacaaaaaatacgaaaattagccaaccatggtggcaccacctgtagtctagctactcaggaggctgaggcaggaggattgcttgagcccaggaggtcgaggctgcagtaagccatgattgtgccactgcactccagcctgggcaacagagcgaaaccctgtctttaaaaaaaaaaaaaaagtggtttcacatggtctgtgctagtggccgctcctgtgtgcctgccagctggtcctactttgcgggcaaaattgtcaaattactagggtagaaggaacatcagttgccgttaatctaacactgcctcctaatctctcccagctgttccttctaacacctaaaacaaactaaggacttcttcctgtttctcatccaattaatacttgacatcgagaacagggacatctgtctgctcctgactcagtgagcttgtgcatatgggggtcaatagtccccacccacctctgtctggccatcctgaagccaagctacccaagataaatgaggtggcacaacatcccttagtctttggttgttctaataggcacacgtttcccaggtcaggaagctgcttttcaggtgcggtgtgagggggtcactctgaagcccccaccccgggctggccctgtgcctttgctgtggagcaccaggcagacagactcactttggttccaagccctaactgggatcctcagtctaccttgtttccacatcccacccacctctcgcttcccccactgacccacatccagctgcaaaatggttccctctttccttggagcatggaatcatcagggatggtggcacaccactggcttcctggccctgggaagagcttcatggtgggaaaggcagcaggctgacctgacgactcacatcagctccactcctcaagagggacctctgcttccaagttcatgtgtttcttttgttttatttattttagttatggacaccaccacagcccagggccgaagccctgtggaggtggcccaggatgttcttgctgctgtggggaagaagaagaaagatgtgatcctggctgacttactgccttccttggctgtttatcttcgaactctggctcctgggctcttcttcagcctcatggcctccagggccagaaaagagcggaaatccaagaactcctagtactctgaccagccagggccagggcagagaagcagcactcttaggcttgcttactctacaagggacagttgcatttgttgagactttaatggagatttgtctcacaagtgggaaagactgaagaaacacatctcgtgcagatctgctggcagaggacaatcaaaaacgacaacaagcttcttcccagggtgaggggaaacacttaaggaataaatatggagctggggtttaacactaaaaactagaaataaacatctcaaacagtaagagttgtagtcttccaggactagaaccttgtgtcctttgaattctcgccctgccagctcctagaaatagtttcaatcttggaatcagatgttatgtcacctgacccagttgtttctgtatttgacttaaacctcattgttgtggcagaaagaccacctccagtactgaggggagaaagttgtagtttcaagaagtcagcagtcacgcccatttccaggtccctatgatatctcatccaacttaaaacgtgggccagtatgtaatggcttatttggtgtatcccaagggatgcctgctttagcacctcataggaattcctgtttctctcttaactctcaccacatccctgtaggatgccaggcaccactccaagcagaaggtgaacttactaaagagagagcagccaaaagggagaggaggaccctgcgtggccccgtgcatcctctagaagtgaaaccattaaattggccagctgggcagactctacagcagcccctggtctggtggaagtgagccatttgttagctctaactagttggatcatagccagaaagaatgcctgtttctgcctttctgatttattaaaaatacattgttgaggctcactgaataggtcaagttcatttctagtgtttaggaggaaacttttcctattattgaaactgaaaattgaaatgtaggtccactgtagacttccccaaattggattacaaatctcctagcacatcataccgacatcttgcaccacatcccaactctggcgtcgttgagcctatattttatgaccattatataacatggtcagcaacatgttatttttttaaattttatttatttattttttttgagacggagtctcgctgtgtcacccaggctggagtgcagtggcacaatctcggctcactgcaacctctgcctcccgggttcaagcaattctcctgcctcggcctcccgagtaggtgggactacaggcacgcgccaccacacccagctattttttgtatttttagtagagatgggggtttcaccgtgttggccaggctggtctcaatctcttgacctcgtgatctgcctgtctcggcctcccaaagcgctgggattacaggtgtgagccaccgtgcctggcctgagcttgtattttaaacagctgccctagacagatgataaaaatggccacagccagtctttggttagggtgtcagagggtttcaggtttcctggttggtaggaggacaaatgggtgattagatctggtgacttgtcccagctcctaacacttcctggacgttccaggagcctctgggtaaaatgtggacacagatgtgatgggtcgttcttcattttccaggtaaattgtcaacctccctcctgacatggaagagaagggtctccttagtgttcacactggagacagtagacccaggcaagagctggaactgagacagcagcagcacctgtctaaagctcagcccgagtctaaggttgaatgaaagtgccgagcacacagcaggtttccaggaaatggcagcaatgaagggcgctctccctttagatggaaatgagaggacatttctccttggatgctgttggctgccacactcagagacacctggtgtccaggtgctgtcctttcctctccattatataacatggttagcaactggaggttgatgtgataggctgccctcaaaggaatgcaggtttaccaactgtgtactccgtcatcagaagatgggaacatcacatatgttgctgaggtttttggttttggggccgttgtgttctgactcacagctggggtgcatggagcttgggctagcattaaagagtgcttaacctacataccacctgtaagctgtaattggttggatggcagccagaacaaacacctgctttcacgtttttttttcttttttgttttttttttttgagacggccttggcctcccaaaatgctgggattacaggtgtgaaccaccgtgcccagcctctctttctttttcattttttttgagacagagtctcgctctcttgcccagctagagtgcagtggcatgatctctgctcaatacaagctccgcctcccgggttcatgccattctctcgcctcagcctcctacaggcgcccgccaccacgcccagctaattttttgtatttttagtagagatgcggtttcaccatgttagccaggatagccttgatctcctgacctcgtgatccgcctgcctcagcctcccaaagtgctgggattacaggcgtgagccaccgcacctggcctcttttttgagatgggagtttcgctcttgtcacccaggctggagtgcaatggcgtgatctcagctcactgcaactgccacctcctgtgattcaccttcaagtgattctcctgcctcagtctcccgagtagctggtacaggtgtgtgccaccatgcctggctaccacctttctaatttattaaaaatacatggttgaggcttactgagtaggtcaagttcatttctaaagtttatttcctcccaattaaagtggttagcaactggatattgacgtgctagaccagccagatgtcaatattattggttgtttacttacccaacattctaaaaacctcaaatcactttctaaaacttaactttataaactttataattttgccatataaatagaaactaacacaaactgaagaattattaaaatctagctaaataaagctgtttgccaaaggcagagtctgaggcccactgttcttgaggaggaggttggcaagtcccagaggggacctgttaaagtcacaccaacaccagacagacgctcttcttggcctcagaggctgaggactaaaagggcctgcagctgtgctctttcatgtccgtgttgctcctacagttgtcttgggtcgctggagttcagtgtcccttcctggagacagcaatggtttggataatgtgagacttagcctttagaattgtcccaacgtagcagctgaagtgacttcctgtgggtgagccccacgtgcattgctccaaagcaagaagcccagccacagcccggttcagctgatggcctttgagcaaccttcattgctcttggattttcaaaccagtgtttgaatatggacgtttgccagcagggttagcgatgctgccattccactttctcttttctgtctttagagggtttttgcccctttctctttcatccttaaattctgctggggaggtctaaaaagcacgatttttatttggttctgccttcaggtatctgatgaagttcaaagacactttccactttgctctttaagccccttggtgtttcacatcatgccaaaaccagagacggaaaaataaaaccaattagcttttccaaacagcagcatctccatgcagtgtagaggggccacagccgattagtgaatcgaagaaaatagtgtacagccctgggcaccctgcccacctcccagcaagtctcccttccttccctcagggcccagcagctgctgcaccagatgtgaaaactctggaggcagctgacagactggaacggggagatccagtttgatcagttgtccttttacataacagctcttcgctcttctctgaaattgggtggggatgggtagctaaaactaatttactagattaatgacacaatctattccctaaagtggtccatgtaggactcatttaagtggattttgcacaggagggccctggtaacttggtctttgctttttcttggcagttaccgaatgctgtttaaaaaaaagaaaaaaaaattggccaggcgcggcagctcacgcctgtaatcccagcactttgggaggccgaggcaggtggctgaggccgggagttcaataccagcctagccagcatggcaaaaccccatctctacgtggtgacgggcacctgtaatctcagctactcgggaggctgaggcaggagaattgcttgaacctgggaggcggaagctgcagtgagccgagatcgcgccattgcactgcagcctgggcaacagagagactccatctcaaaaaaaaaaattattttttggagacagggtcacactctgttgcccaggctgaagtgcagtggtaagatcacagctcactgcattctcaacctctcaggcttgaatgatcctccctcctcagactcctgagtagctgagaccacatttgcgtaccaccacatctggctaatttttgtctttttttgtagagacaggtcttgttatgttgcccagactggtcttcaactcttggactcaagtgtttaatggtcctcctgcctcagcctcccaacgtgctgggattacaggcatgagctactgcactcagccttcaaatgctatttcttgagaagtactgtcgcatatcacagatgaccataagcaacttgtcagcagctctgccatgactgatcatctagcaaggacaatggcaggaacagagaagtcagcactgacagtgggaagggaggcacatttcttgctgccagcctcaggcacacgaaacccctgcctgcagtccacaccagcacctcatccccatctccctggccaggggccatgtaactaagatggcatttcagaatctaggttaatacatccaataagaatcacttggttcagtgcagcttgggaaatggtagaagagctacccatttgcagctggattctacctcgggggagggctcctgctcagctgacttgaggttgcctcgacttgtctggcttgtccagcttgtgccttctagtcaattcccccatgaaatctaacttgttggcagagcacttccaggccaggtatggggctccctttccaaacctgggcattattaagaaaaaaaaaaaccaaaaacctgcccagcaggctcagatgccagcactcagacacctgaggggtcatgggcagctgcatttcaactcacactgctgtcgagatgaggcatgtttttacgggatcagttgtgtggctaaggcagttccctctttaccattattccaggtgcccagagactgccacgtaaacagtggtgcacacccaacaccgtcatgcccccagcactcaactgagtgataagttatttctaaatctcttggaattaaatcaaagtttcttaaactttttgtgggccgtgggtcccttttaaaatccttaagaggtgtgaatctcccctacaaaaaatggcccaatcacccctcgtgaatccttcccatgcaccctttcattactctgtgacatcaggtcttcctgatggggactttaaaactaggtgagaaaccactttggctgtctcttaaatattggcctggccaggcacggcagctcacgcctgtaatcccaacactttgggaggccgaaccgggcagatcacttgaggccaggagttagagaccagcctggccagcaaggcgaaatcccatctatactaaaaatacaaaaagtatccaggtatggtagcacacagctatagtcccagctactcggggctgaggcaggagaatcacttgtactcgggaggtggaggttgcagtgagctgagatcacatcactgcactccgtcctgggtgacagcaagactctgtctcaaaaacaaaacaaaacaaaacaaaagactggccttcagaaggaggtgccatgtggctcttcagggatgaatggggctttaggaaggcagaagtgaagacaggcaccccagcctttttgtggaagagagaatttcccatttacccaaagccttagagcaagcttgtccaatcaccaatcagcagcccatgggcctcatgcagcccacgatggctttgaatgtggcccaacacaaatttgtaaactttcttgaaacattatttttttgtgatttttttttttttttagctcatcagctgtcgttagtgtattttatgtgtggtccaagacaattctttttccaatgtggcacagggaagtcaagattggccacccctgccttagaggaaatgtggcaggtgacacagtctaccttctggtgtgagggagaagcaccggcttggctcctgtggaacagcgagcactgaggccagggggtgcttccaagattgctccgagggctcttctgtcagcctagggcaatgggttaataaactcatggtccacagtaggaagagttttggtgcttcaaagaaaacacaggtgttcagatctctgaagagcgatcctggagcccagagttccccacgtgaactcaagtggacacccaaaggcctccaagcctcgtcaccttatcctaccatgttcctgaacagcatggtggcagtgatggccttcggaatgatgaggccaaggtgagccaggagactgctcctgggcggggtttggccccaggactaccttggatctaggcttgtcgtcgctgtaagtggtaacactgggccgcagctaggagcagggcagggtggctaccatggcacctgctccttccatgtgcaagccgccacccagagcagatgtgcagcagcagctgcgggcagtcatggaaagagagaacagcgggagttgaaattctcataattttaatgatcaatagcttctggtgggctctggatggtacagttaaacaatagacttaaagacctcccccaaagcacgtccacaccccctcggcagcgtctgcctccatcagcattccactgcccagtcggacttccacagcctcagacccccctcttgggttatggaaatccacatcttagtgtaatgagctgaaaaaccctgggtacacccgtgatctgttattttttaaaaataacaaatactaagccaaacacctgcccaggctctgctgcctcacagagtgtggcgatctgaatactctgttgtctcttgtgggccgggtggttttgcttcgctccctgttctactgaaatcatacggcatagagttcgtaaatcttctttacacagtacaccagggcggccagtgctatcgtgttgtgcagtctctttctgtgcaggtcgtccttccggaccagcaccaccggggtggaggaggtgagtgtgtgcagaggcaggcgcgacagtttataggcgtcgtactccacttggtacttgcagcaagggtcaaactgccaggagatcccatagagggtgcagcaggccaggctcagcacaccagcgggcagggaaatgtagtgggaataatctaagggcagcgccaacggggtgaagaggcaggcggtgcccgccagcacggccgtcttgtgcaggcagttgcccacggtgatccagcgggctgtctcgtcgccaatgcgagtgggctcaatcacaatgtacttgtactgggcttccagggcctgctccagctcgtactcaaactggtcttgggcattctccccattgtagatctcatgcacaatgtagcagtctgtggccgacaagctcacccttttgatggagggggcaggaaagggagagagagagagagacaggatgattaggctgaggagcacttaactgtgtttcagcgctgggggaggtctgagcctgcactgcggagagcacatctcacttgggtcctcatctcctttaaatcccaacacaagataatcagtaaaaaggatttttcctgaaaatagtgaaataaagctgggtgtggtggctcacacctgtaatcctagcactttgggaggccgggggggcggatcatgaggtcaggagttagagaccagcctggccaacatggtgaaaccctgtctctactaaagatacaaaaaaaaattagccaggtgtggtggcgcatgcctataatccctgtaatctactcgggaggctgaggcaggagaatcacttgaacctgggaggcggagcttgcagtgagccgagatcgtgccattgcactccagcctgggtgacagggcgagactcagtctcagaaaaaaaaaaaaaaaaaagatataaaaaggcaggaaaagcagtgcctcgacgtttaacatgacaaacacaggcctggtggttagcctaaggctgtggaccaactgatctgagtcagcaaaggagcctaaaggggaaagaacgattcggcacagaatcacaggagcacacacggcagcagagggccaacagcctgaaagccattcttagttaatcagggcaactgcaagaggattcttcactggaaaccacagacctcaggacagataatgctaagcccttgccctccgcacgtttcctaagtagtcatcctgggcctgcagaacagaggcagaaaggaagagctttgccttgggcgaatgaaatccaaactcctttggctctcctggaggccaggctgcacaagccctgggtgcccttcctgggccggcagcagcccccagctcctccccgctgcggaggggagaagaggagacccaggacactagcccactgcataggaaaagcgaccctttccttgaattaggaaaagacaacgcttcaagaacagtagtgggctccaaatttagtaagcaggagggtcaactgaggggcttcaaaacatccagcccagcaatgccaccaattctggccctgtaggcccaggcccctgcaccaccggcaaatgccactcatttgcataagaaacactgccacggagaccacacaaggggctttcccccccgggactggggatgcatgtcatgaccccaaccagcaggagagtaatccaccacacggaacgctcagctctgcagcaaggccagacggcagcccggctgcagccccagcagtgaccgtgggccaagctgcatttcaggcagtcttgcttttcttggtttcaggcctctgcggtacaaatttcccacccaaagcagaatcttcttcacctgtggcgggcaggcctgaagacagggctatccatgccttgtcatctttccttggctggtttcagctgagacagatctctctgaatctccgcaccgtcaccccacatcctagttttccgttatctgctcatctgcaagaagtctttatctgggccttgacggggacactgctagacatagctcttgaggctggatcaagttttccaactcatggctcccaaggctgcacagagccatgttctgtcacatgcctcagggaaaagctgccccttccctcagcacaccctggtccccaggatggtcggacccatctgactaaaggacacaaggctccagggacctgctggtcactgctcccctgctggagtccatgcccttccaactgggaggctctggaacactgtaccaggcaacacaagggtcaatgtggcccatgtacctgaagctccgaatgtgcctgacaggaactagcttcctttcatggctaacgagaagcacagccctcagtgtgcacagacgcgaaggtcccgtccgcccagcctgtcctggcaggcacacctggctgcggtgcagaggagagtcatggggagctgagccacctggccattggccgtaatatgggagtgacgagtgaagacattcataacaagccaccccagaacctcagcccagcatgaaggtaactccctccagcctccttcaaagatgggagcaattccaagtgaaggatggtggaaatcggactgtcgggaaacttcaaggaaaaagaacaggcaatcgtagttcttcctactactgagactcctcccagctcaaagctttcagcaaacaaataagcaaacctaacaggcagggttgcattctggttggataaacaactagttaacgatctcatgtggccacattaaagatgaaagtcattggtaatgggctgactgtgcccccaagcatggggaccctaaccccgcccctgggtgggaaccactttcataaaaggcactggcttggacttgggcaaacggaactctttatcctgaaaaagtcactgtaactaagccaggctaaggcaaagcctcctaattcaatcataggccctaattaaacggcatgcactggggagaaatcagtgccctgagggtgggacaagagcctcctaaacatgggttgctgccaagccacctgtgactgtgccagtgtcacggctgcctcgccagggatgaaatgatgagctgttactgtaagactgcacgagcagcttatgaaatggggaaaggagggttttccttctaaagttctcggtggagtttttccatttggtcttagaggagaggtaagggagaggccagctgttacttccaggtaggattcaacagtttttatttttgagacaggttcctgctctgtcacccaggcaggagtgcagtggtgtgatctctgctgatggcagcctcgacctcccgggttcaagagatcctcccacctctgcctcccgagtagctgggactacaggtatgtgccaccacgcctggctgcctggctaattaaaaaaattttgttgtacagatggggttatgccatgttgcccaggctggtctcgaactcctgggctcaagtgttccacccgccttggcctcccaaagtcctgggattaacaggcatgagctaccgcatccagccagatgcagcattttagaagctacctacagcaaacaagcacacccaaagcagggtcttcactggcgctggaaagctgaaggccgagcagtgcccccacgtgctcagatgagaaatgagtggcggtggcgcaatgggctggctgtggccctgggtgtgcggggaggggcggggcctccactctcaggtgggagcactcctggccaagagaactcccttctggtctcaagtccatcaggcaacaggagcagagaggccagataacaaggtaggggtggaggaccaaatcgtgtcccaatcttgagacggaaatggagttgcttccaagtcagctgtgcatcctactgactgtcaaagccaggccagggacaccttggggcgggcaccagaggcgggcttcctccctcaggaacactcaaagcaaaagggaggtgtcaagctggggttacacaatgttctcgccaacacccaaatccaccctagtgcggtacctttctctgcccagcaggccagcgccatcctgaatgtagtgaaaaccactgttggtcccacagaggaaattccagtggaaaccccggtcctggaaccgactgccccatctggaaacacagcagtgggcagatcccaccccctcaccccctccggcccccctgcaagcccagctggcacccacatccacccagacccctctgcaggctccatcgcttgctgggacggatgggtgggtgcgtccacgagtcccaaccagcctggaagcagcgagaagccaaggccctccaggctccctcccacctcactgctgttgccaggtgtggcccgccccccagcacagggagtgaggagactgggcatcctctgccctcggctgtgggcagtcctgtgaatgacacagccataagcaagcacgtggacatgggggcactcgccagcacacatcctgagatggtggcgtgggtctgcccccacctgcctgtcaaaccatggccccggcctcctgcagcctcggcgtcttcatatgggctgggcactgttgctgcccactgtctaagacacctatccacagcagaaacacaaaggacataagccacactgccttcaaacaaaggcagggtcctgcacaacggcgctgaggccagaggctcaccaattctgcttttaaagccagttaggcaaagggaatctcggtttccactgggaaaggacaacacgtgaagtctagggaagtggatttctaggattctataaggcaacagaccctatatggagacggtaaggttcaaaccaaaacacacacagacgcacccaaagccgcaggatccctccgttggagctcacccggccacgaccaggcagtcagcactccaacttcctggtacactggtgggagtggggtgctgtcagtgcagacacaggttttttagctgccactgctgggcccttgggttcaggtctgcactgctgacagggactgctgcacttctcttacttcagaaattcgtggccatgaccaggtgcggtggctcacgcctgtaatcccagcactttgggaggcaaaggtgtgcagatcacttgatgtcaggagttcgagaccagcctggccaacaaggtgaaaccgtctttaccaaaaattagccaggcgcggtgctgcacacctgtaattacagctactcagcaggctgaggcacaagaatcacttgaacctgggaggcagaggttgcagtgagccaagattgtgccactgcactccagcctgaatgacagaaagaaaaaaaagaaaaaaaaagaaaaaagaaactgccaagtactcccaggagacagccacgtccagccagctcctgaccacccagcagccacccgtatatggcttgcttctgcttgtgggtcaaacaaaacctaatgaaggaaagaacccagtcagaaggttatctcaaaccactgcagagcatcaccagctgccccctaactggtaaggccatgggctttaggaactgggtgatctgaaccctggtgcatgggagatctttttttttcctttttttttttttttttaaattatatggacttttttttttttttttaagtaagagctagttggaatcttttgagccctgggcttcctaagggactgtatttttgcttttcattgcaggtgtgaaatgaccagtaagagagcaattaatagagtctatgtttaaaaaaaaaaaaaaaaagaaagaaaaagtggccaggtgcagtggctcatgcctgtaatcccagcactttgggaggccaaggcaggcggatcacctgagatcaggagttcgagaccagcctggctaacacggtgaaaccctgtctctgctacaaatacaaaaattagctgggtttggtggcacgtgcctgtaatcccagctacttgggagcctgaggcagaagaattgcttgaacgcaggaggcggaggttgcagtgagctgagatcatgccattgcactccagcgtgggcaacaagtaaaactccgtctcaataaaaaaaaaaaaaaaaaaaaaaaagagaaaaaggtagcagcagtaacagcaaagtctccaactgaaagcaagttcaggggaaaaggcagggttcagaagagtgtttacagtatgctatacgtagtgtatttttaaaagtctctatttgcttttatatgcacagaacacttctgaaaggatacacaaagacctgatttttatgactggtcactagggagggaactgaggggctcaggaaagaaaaggaagggaggctctttctagtaaatgacttttgatccttttgaatctggcatgatctctggtacttaaagatcactgtcggaagtgggtcttaacatatggaagaagaaaagtaaaaggatcagtgtcatgatcctaaacacatcatgccagcactgaggaagctttggattctctgagcctttagtgctgggagcaggggtcagcccgttccagcacctcagggggactgctgcagacactgaatgggaccgctctctgccgcctcaggatagcttgcaggcactcataaagtgggcatcttgaacttcctccctcagccttcaaccagagtcagccttcaggccctcatctctccacttttgagcccaactcaatcagctctcgcagtcagcaaaggaatcccctggcaacactagcattccagttaaaaggcggccacagtgaaaactcagcagggcaactccacggcccctctgggatgtgggcagcctgtgcctgtcccagcagccacagtctggaggcgtctccccaaaaggcaagagccgcacaagaaggttcagagcagaactgttcggtgagagcaaaagatgacaggagcggggagagcagaatcgcacctcctccattagtgacatgaatcagttccagtggcctgagccagggatacaactctcacacattctaaggcggcagagctcagggacgtgccactgaaagccaactataaggacagcaagggtgctgtggtgcacttggggcacagggtctccgctgcaggaggaggcaggccagggtaacgctagttctctatcgcgctgggtggggagcccacacaactatcactttgccttttttaaagtgtggtaaaatacacgtaaaatataccaccgtaagcacttttaagtgtacagttcagaggcactaagcacatgcacactgatgtaccaaccatcaccaccatccacctccaggattcctttaccttcccaaactgaaactctacccatgaaatgatccccccattccccaccaaccccaagcccctgcaaactaccattctactttctaccccaatgaatctgactatacaagtacttcatacaagttggatcatatatagtatatgcccttttgtgtctggcttattccacagagcataacgagtcttcaaggttcatccatattgtagcatgtatccgaattttcttcctttttaaggctcagtaatgttccaccgtatgcataaaccacattttgttaatccattcatctgtgatggacacttcggtttccaccactggctattgtgaataatgctgctatgaacatgggtgcacaaacatctctttgagtccctgctttttttggggggggggtatatatacccagaagtggaactgctggatcatatagcagttcaattttttagtttttttgaggaatctctatactgttttccagagcagctgcaccattgtacattcccaccagcagcgcacaggggttcccatttctccatatcctcaccaacacttgttattttccgttttcttttcttttgaggcagtctcgctccattgcccaggctggagcgcaatggcgctatctcgactcactgcaacctccgcctcccgggcttaagcgagtctcctgcctcagcctcccaaatagctaggactacagacatgtgctgccacgcccagctaatttttgtatttttagtagagacagggttttcaccatggtggccaggctggtctcgaactcctaagtgatctgccagcctcagcttcccaaagcactgggattacaagtaagagccattgtacctggtctcattttctttatttttatttgtttatttattttgtggagacggagtttcactcttgtcacccagactgcagtgcagtggcacaatctcggagcactgcaacctccacctcctgggttcaagcaattctcttgcctcagcctcccaagcagctgggattacaggcacgtgccacaacgcccagctaactttgtatttttagtagagacagagtttctctatgttggccaggctagtctcgaactcctgatctcaggtgatcccaaaatgctggaattacaggcatgagccaccatgcctggcctgatttgtattttttaatggcagctttactgagatagaattcacagctttactgagatagaattcacagagcaactcccccatcggaggtgaacgatgaagtggctttcccaaagttgtgcaaccaatagcacaactgatcctggtgcattttcatcatctcagaaagaaaccctgtaccaattagtggtcccttcacatctccccagccctccacaaccaccagtcggcttcccaactctctggatatgccaattctgggtatttcatttaaatggaatcctgtaacgtggtcttcaacaactggcttctttcattttgcattatgtttttaagggccatcatgctgtggcatgtttattacttttcacatattgtaaacataacttttgatgtgtttaacatataactttaaaaaatctaagataaggctgggcatggtggctcacgcctgtaatcccagcactttgggaggctgaggtgggcagatcacctgaggtcaggacttcaagaccaggctggccaatgtggtgaaactgtgtccctactaaaaatacaaaaattagctgggcgtggtggtgcatgcctgtggtcccagctacttgagactgaggcaggagaatcgcttgaaccccggaggcagaagctgcagtaaaccgagactgcaccactgcattccagcctgggtgacaaagtgagagtccgtctcaataatataattttaaaaacccctaaggcaagatatataagacaaagtatcaaaggtgctatacatgaaaatagatcaggctaggcgcggtggctcacgcctgtaatcccagcactttgggaggccgaggcgggcggattacctaaggtcaggagtttcagaccagcctggccaacatggtgaaaccccgtctctactaaaaatacaaaaattagccaggtgtggtgacaggcgcctgtaatcccagctactcaggaggctgaggcaggagaatcgcttgaacctaggaggtagaggttgcagtgagccaagatcacaccactgcactccagccagggggacaagagcgagacattgtctcaaaagaaacaagaaaatagatcaacagtggttttctttggatggtggcctaataggtgacttgtcaatttcttcatgcttttctatattttttaaaaaaaagtgtttcttttttttttttttgagacggagtctcgctctgtcgcccaggctcaagtgcagtggcgtgatcttggctcactgcaagctccgcctcctgggttcacgccattctcctgcctcagcctccagagtagctgggactacaggcaatcgccaccacgcccggctaattttttgtatttttagtagagacggggtttcactgtgttagcgaggatggtctcaatctcctgacctcgtgatccgcccacctcggcctcccaaagtgttgggattacaggcatgagccactgcgcccggccaaagtgtttcttttataacaggaaaaataattataaacttattcttaaaaagaaaaattctgttcaaccctatatcccttgaggtaaagggaccagatacccgtgggagggcctccttccactgccaagaagagcgggaggtggctcacttcctgctccagaaccttctcggtgtccatgaaaggcagaagtctggacgcgggcagcttctcatggctgaggtgtcatgctggtgtgtacctgtagtcctgcccaaaaagaggagggcagttccagctccgtttcccttgagcaaacactggctaagctgccaggccagccaccaatcaccttcccagttctgagagacccagcagaggcaaatctgagtggaagcatccacattaggccccttcttggagtggggcccgggctcacaggcaggcctgaagctccatgagggcagaggctgcattttcatcgtagtttccccagcactgggcctgaatgtaacaggttcccaaaagacacaggttggagggacatttgtaatgattacagacatgagccacaggagtcacaggaggagaaaaacaattatggttattaagagaactggtaccagaaaagtcaacccatccgtcaggctgcttttcacttagtgaaagggtcacttgatcacctatgatacaggaggtgctgggctggacctccacccgcttctgcctaattaagccctgcttctttgggacccacagaaagcagaggactgaagcagtgaaagcccgtgccccagactcaaaggcacgggcatgcggccccatggcctgaggacggctcccacaggccaaggaactttcacaggacacccagccctttcgtctgcttcagaggacactttcctattctgcgcactggtaactcagcagcccttctatctggggagcaggaacacggcgcaccaagtgtgggagtcgagagggtggattcaagttccctctcggctgcctactggctttgtgtcctagggcaaaacacccggcccctctgagccagtttcccatgttgtcaaacggggccagaggccctggctctcccagaggactgcagtgaagatgggaacagtcgccaagcactgcccctctgcctaagacacatgtggctgttgaaatttaaattaattaaaattagacatcttaaaaaattcagttcctggccgggcacagtggctcacgcctgtaatcccagcactttgggaggccagggcgggtggattccttgagcccacaaattttaagaccagcctagacaacatggtgaaaactctgcctctacaaaaaatacaaaaatgagctgggcgtggtggtacatgcctgtggtcccagctactcgggaggctggggtgggagaatggtttgagccagggagacggaggttgcagagatccgagatcataccactgcactccagcctgggtgacagagccagacctgtctcataaaataaataaataaatgaaacctcagttcctcagagccacacgtggctaatggctgccctaatggactgcagggacacgccaggagtctgtcatgccagaaactcctactggacagccctgctctgaagaactgttatgactactacatggctgtcagcttttcctgagaactgtgcccataaagtggctgctggcaccagggcggaacaccgtggcagtcaggaggttcccgggtgtgctcggtcatggagtgctgcccaactccaccccccgcacctcgctcattgaagaacaggtgcacaccgacaagccggggcagaggagccacctccccacctccgtggacccaggcgcagccctcccctcttcagaaaggggagccttccctggaacatgacctaaaggactgaaccactgagacacaaattaatgcacttggaatccaggctgcttgagtgaaccaaggaaaacagaaattcttgaaaacttgaaggcacatcaatactgaagaggatgaaccccatccttacctacgaatccaacttctgcggccagaacatgtggctttgcctttgttaaagagctgagcagaatcccacaaccagtggctaaacccccacacacttgggtgcagatcccgtatctgctcatctcatcccagccagaaggaaacaaaaactcccgccacacacaaaagcaagcatggagtctttcaagagagattaaatactcccaaagcctgagagtctaaaagggaaggatcagatcagaaagggaagctgtcaccccgggaccatgacccaacctgcccccggggcctgtgctccatctgctcactggatgaacgtgtaagggccacctgggaccaggcacacctgagttcacaaagaagaggacaggtcctggggaataaagcatggcaaggaaagccatgaaagtcagcccagggaactggctgcctataaaacgctggagcagatggccgcgcaagccaggggaggggcaggccacaacaaataacttcgcgctaaacctgaacttttagccccgtgcatctggccctctgcacaccccaggttgcctcatatcatgctcagaagcagatcaagtacatcttcacgtgattataaaaacaggaactcaagagcacacagctatactcacattccaacaatcacggagggctctgggaggttcaggggccctgagacagtgaagccgagcagcccaagtaagacaggcagggctgtctgtgagctggtccgggctggcacacggtggcagaacacagatacctgcactgtgctttcctagatgggcaagtgtgtctcaaagacgccgacaggacaagtggcaatctgtttgatgtgctcgttgccagtgtgctgaattttggacaagaattcaggttacagctcagagtctgatgttcttcattacaaacactgttggttccctagatttaatggagtggagagaaaaatcaacatgcaagcactaccattttgctatttccacccctcctatcttagtcgaaaccagcactgtccatatcataactttctgcagtgatggaaatgtcctccacctatgctgtccaatatggtagccacaggccggaagtggctattgagcacttgaaatgtggctagtgagactgaggagctgaattcttcattttacttaattttaatgaatttaaatgtaattgccacatgtagctggtgactactgaactgctgtgttaattcagcactaattctagagctgtggttctagactcaacaaggtaaagcaagaacccacacgctacacgtgctaaactggaccatccaacacacagcgccggcagtaatactgcaggcagtctggcactgggtgggacctttaagtacaatgcatgcttcagagttggtagccgctggcaaatctggcaagtgtgcccaaagtgtcactctgttctagccccttccccaaaccagataatgtttccctcagcttcagcaaaagcagatgctaaccaggtgtgagcagcaacgggagagagcactcgtataacatggagctgagatttgagtcagcacgaatgtgacatggaacaaagtcattttagagagccataaacagcctacttcagtcataagagccaataatacactcagatctcataatctagagtgctgggccatcagctaatccgccctgccccacctgaacagtcatcaccaactgagcaggaatggagggatgcccagaagtcagctcgctagccccacagcgggttatgtttccatcccctgctcagcatgggaagagcttagggaagctgggctcggggaaatgactcttccaacagaacctggctaggggtttacagcaagagcaaacagacaggtagtctccacccataccacgttatctaggagagtagatggtgacatccaaactacaaaaccaaatgccacattcctgctgacacacaacatctgcgtgtgtgagtagagccttcagttccaggccaaaggtgcaacctgaacacctacagagaccaagcaggcaaatgcattgagtcaagctgacaggtgatttgagtcaagctgtcaggtgatttgagtcaagctgtcaggtgaggaaccaagaactggaaccaagcacttgtcccgaccaaaaagagtcagccactacccagcttttcagggagcgttttatatgaaatctgctggcaactaatttaaattctcttaaaaactgttgaggttcaacagtcaaggactggatccagcctatgcactgctaatttgcagatccattttgaataaacagttgtctcaagccaaaacaaaaacaattctcagcatctattttcttagatcaataaaagcttaacctgtgctggcaaggctcctgttccctgcctgaggcatccctattcggctcttttcagatgcttttagtccaacaagagggcgtatgtttctaatactttgttttctaaacaggttatttcgtattactgtttgcattgaatatcttgaaaatgtttgctagtttttaagagcatctgaaaaccattgaggtaacttatttaaatggtccaatctaataccaggcgggagttagaaaaacaaaagtgtgtttaccactgcttttccaaggaagaggaaatgcagaatgggcaacgctggataactgggctaaagaataaagtgcaagcaagctaaaggattctatcacaactgccaaacaggaagaatcttcccagctgggaaagccatctgcaagcaatagcaatgaacacgggatggaatcagtcacagaaaaggaataatgcagagtagttgagaggaagataacttttctgttagacaatcctcaccaaaaagacggggagggggagaaccagcaaaacaaaaacttttccttttttgctgaccgctgctataacaatcaagctttagcggacagttaatccaggtggctccaccaatacatcttctcccaaatttctagtggctgaacagcttctagtggtttccactagctgaaactgcttcccagatgcaaaaactgcaacttgaacatgaaacacggaaactactccaatctcatcttctagaaatcagttattcaaatggaggtccctgttggaagaaacacgctcctagctccctgcccacacaccattcattaggaaaggtcactttaaaggacttctacggcaggagcgcttgcacagaaccatccaaaagtcttcagaatcttccctcgaggaagtggccggctctgggctcggaagagacacatctggcgggagctaaagctccctagtaaacgtgcagatcaaactacccctgccgcggccggcctgctctgtgaaggcttccccttctttctctctccgggggccctgccttcctctacacgtctggggccgcggccgagatggccacgcgcgtgcccaggcgggaagggtgcttcagcagccgatcggcccgcgggcagctaggcgggtccctgaggcctgcgctgggcgccagttcctttcagcacggcccggcctcgggccccgccccgcatggccgctgcctaccttactcagcccggctaacgccccttcccctaagctctccgccgaggccttcgacctcgctcccacccggatcccggatcctccggaactggaacccagtatgcccggcgagggtagggggagcgcggggaaaccagggaaggaaggctgctgcagccctcggaggccgcgctgggctctccggccgctgagccgcctgcactgggggcaacaagcccttggatctcacctctctcgggcgctgccgccactgctgcccgggccaagacgcctccttccccaagcggccatcttggagacactctgcttgccaacgtctcgcgccaaggcggcatcgggagagcaggcgggccgacgggaagtgtagtccggcctgcggtccggggccgctcggcaggcggaagccagacccggcggaactaccgtgcccacaaggcagcgcgccggaagccccgcccccggggtcgccggggcccgtagtccttctgcgagggcgcgaggactccaggagccgtcctggttcgagcatttctgaagaaactgagttcccggcgttcgcagcctgggagtcacaggcgcccacccaccggtaggtccttgagtttcgagagccagtagctgaaggagagaggagaggcaagtgcctacaactcccagagcactgcgcggaggcgcccggccgcgctgtcctggccgccaggctgcctctcccgctgggggccgccgcgctgtctgcgggctactagcgccgggcccctccgcgtcgccacgcctgcccttcacagccttggcccataaggtcaccgaggggcgggaggcgccgcccgggccctccttggaggcgggcgctgctcccgcaccatcctcccccagttctcttagactccggggtactttggaggccgagacagacacgctgtccctgctgccacggaggtccctgcttgcaggtgcaggctgttagaggagagggtctgaaaacaagaaaggggaatagctgtatgataactgcttgaaggcgagagggcccagcgacagctctgttttagacagggcctccaggcctcttagactcagtccctgccacgcacccactcctgccctggccgctgcgacggcataatctcgggatctttgaaggcagatgcggggctaaaccatcccacctgacgggaaccctgccacaggacccgacatatccctgtctggacactgctgtaacgagtcaaagtcaggaaggactaactggagcccagagattcccaggtgctgctgcctcagacctgtggactctttggaggatctcttacagtttgtgaacttctcagttcctctactgctcccacagacaacgttgctaaacatattaattggtcccataaatacttgagcaaaacaaatgcgaaaatctgtcccgaattcagcctagaagaagcccagccctgcgcgtcacacttctgtgtagtggaaccccccttcccaccccgccgcaggccacagcaggagggccagcagacggaaaggcgaccctctccttgttgaggattcctttcgatttccttccagctgacattctaccacagttttagctgcttgcaatcctctcaccgtccctcatcacctacagtgtgtgattcaaattccttagcacaatcaagaagcccctccttagtttggaagttgcctagctctccaaattcaactgcctacctttcccgtctggaacttgccaggctagtaaattcagagggtttgcagatacgtagatgttctatgctttacctaaaatgcttttacctcccagccaacttttttttttttttttgagacagagtcttgctctgtcgcccaggcttgagtgcagtggtgcgatcttggctcactgcaacctccgcctcccaggttcaagcaattctcctacctcagcctcctgagtacctgggattacaggtggtgccaccacacccagctaatttttgtatttttagtagagacggggtttcaccatgttggtcaggctggtgtccaactcctgacctcatgatccatccccctcagcctcccaaagtgctgggatttacaggcatgagccacggtgcccagctctcccagccaacttttgtccttcaagaccttgtacctgtctggtctctaaaaagtacctggccttcctgttgagtcatacagccctgcctccaagtgtcagcgtagttcatgctggagacctcttaacagttccatggtatgacactgcggatatggctgtcttttctttgtatcagtgtggtgattcagagggtatactagggattctagaacgcacttctggctcaggggctgcttgtgtaacttctgtttctcagctgcctggtttgtatcatgggatgatagtatctcccctcagaggattgcggtatttcatgaggtgatacgtgtatggaggccaagtgctgttttatattttaagtgatctacatcttgattttcacaacaactgtataaaagtgatactgttggccaggtgcgttagctcacgcctgtaatcccagcactttgggaggccaaggcgggtggatcacctgaggtcaggagttcaagaccggcctggccagcatggtgacacctcgtctgtactaaaaatacaaaaattagccgggcatcgtggcacacgcctgtaatcccagctactcgggaggctgaggcatgagaatcatttgaacccgggaggtggaggttacagtgagctgagatcgcacgactgcactccagaatggatgacagagcaagactctgtcttaataatagtatcacttttttttttaatcaacaatctcattttgtaaatgaggaaatcaacttacagacgacctgagtgacttgctcacactgccagccaggaaagtgctaggatttgagcccagactgtccagttacagagattacactctgccattgtgcctctccagaagcactggaggtaggtctagtgcatagagtaaatgtaaatgctgaaacaactgtggccctaatgaacatcccatttctccagctttttactctccccttaacttctgaatgaccgtctgcttctaatctgccaacttggtctaagatcctcacggtgtttcctcctgattactgttaatgcacggaggttgtctggaaggttcataggcagcctgattgactcagtatgtattagctgagcacctttggagggcacagcctgagtggtgggaattagttcctgggggctgtcctgcggtggagactcccgtgagccctctgtcctgctgtatgaaggcagccagtggaaaggcatgtcctcgctggtgctcaaagtaatctgctacttctcttactacacttttcattcattcattcttaaatcgttgaaggcatactctgcaggtactcttgggcacagagatacggtgtttagtaagacaaacactgttcctgggtcttaacgggctttacattccaatgggataaacaacttaagtaaatattttcagagaggagtaccaagaagaaaaggaacaggatgatataatggagtgacttggagatcacaggtggtaagaggtcactctaaaaaggtaacatttgaaggctgggcacaatggctcacacctgtaaccccagcactttaggaggctgaggaaggaggacagcttgagtccaggagtttgaggccagcctgggcaacatggggagaccttgactctacaaaaaatttaaacattaactaagtatggtggcacgtgcctgtagtcctagctactggagaggctgaggtgagaggatctcttgagcccaggagtttgagactgcagtgagctatgtttgtattactacactccagcctgagggacagagtgagaccctgtctcttaaaaacgaaaacccgactgtatcaaaaggtaacatttgagtgggacttgaaagagtgtgcatgcgaaggactgaagacagaatgttctgtgcagagcgaattaatgcaatggctttgcagtgcagatgggcctggggtggtccaataaggttaggaccaaggtggctggagcatcatgagacaagcgtggtacttagcttgcctttggttaagtcactttctctatttgaatttcagtttctcacctgtaaaatatgagtaattttatctgtattagccagtgtgtaattagaggaaaaaccatttaatacagggtattgtttacaaaggtgttggaagggcatgagaaacaaggggagaacaagggcacccaaagcctgacccccacaaggctagaggagcaacaggaaaattcgtttccagagactgattcctcagctgctgagcaggagcctggagccacacttgctgcctggtactactgacacacaactggaaccaccgctgtggcctggggtgccaccagaagccagagattagaattgctttccccatctcatatcttccaaactcccaccagtgcctcccactggctgagtcagatgacaagggagtctgggaaatgtagttgtttggcttccagccctgaccatggagagtatagaaaggcaggtgtaggggagaaaatagatgccattcacacagcgcctatcttgcagggctgttttgaggagtaaaaactcagcctatttttattcctcatagcatgtagtagcattcagggaaaggcaaatcttccaaaacaatatcttaggtataatagttctacataaaggtttgaatttaccattaaaagcatcaaaatgagcattttaaaagtagaattttaagtctgaatgggcagtatattcacatggtataaaattcaaattacaaaacaatatacagtgaaaaataagggggtttttttgctcatcttcttgtgacctggctctttccatctctgtccacaaccctctgcaggcaataactggtacctttgttatggatcctctgcagatataaagtagacatatattaacaaatgttttctttggcccagaggatgcatattatgcacattcctccatttcttgtttgtttttgttttttccacttaattgtatcttggagatcactctgtatcagtatatatctgatttgttttagcagtacatgataatccattgtttggatatgccataattgtatcagccagtctctggacagtcttttactatttcaaggagtgctgcagtaaacatgtttgcgccacttcctggtacccattgcaaataaaactgggataatttcctgacgagaacttgctgggtcagagtgtaggcacttgttgttttgataaatattgccagactacaccccactccctccagcagtacatgacactgcctatttccccacagctgtgccagcatggtctgttagcaagtgttttctttttgcaaatttaaaagtggtatctcgctaaatgcaatatggtagcagaggacatttgtggaaaaacaggtgaaatctgggctgggtgtggtggctcatgcctataatcccagcactttgggaggccgaggcaggcggatcacaaggtcaggagttcgagaccagcctggccaatatagtgaaaccccgtctctactaaaaataccaaaaaaagttagctgggcatggtggtgcaagcctgtaatctcagctactcgggaagctgagtcaggagaatcgcttgaacctgggaggcggaggttgcagtgagccaagatcatgccactgcactccagcctgggtgatggagtgagactctgtctcaagaaaggaaaaaaaaaacaaaaaacaggtgaaatctgaatggggtcttgagttcagttaatagtaactgccaatgttggttcttagttttgacacataccatgactatgtgagatgttaatgtcaggggaaccaggatgaaggctatacagaactgtactatttttgcgacttctctgtacatctaaaattatccttaaaaaggtttctttaaaaaatgacatcttgttttctgtaaaatttgaatttctcatgagtgaaatggaacgttttgaatatgatgctctttttaaaaggtggccttaataatttgtatttactaaggaaaaaagtcagagtttatttactttaaaaaaattcaggccgggcgtggtggctcatgcctgtaatcccagcactttgggaggctgaggcgggcggatcacgaggtcaggagatcaagaccatcctggctaacatggtgaaaccctgtctctactaaaaatacaaaaaatgagccgggcgaggtggcaggcgcctgtagtcccggctactctggaggctgaggcaggagaatggcgtaaacccggggggtggagcctgcagtgagcagagattgcgccactgcactccagcctgggggacagagcgagactccgtctgaaaaaaaaaaaaaattcattaacagtacatttaaaatttctgttactggagattgtatttctcattccatccattaatgtgcagcttcaatgttttcccccagatatgcaatttcacttacaggatcttgttcttcagtgacatgtcataagagttaataattccacaagccaccctgcactgctgtgatcctaacaatattgaaaggttggtgtgtatcctttcctacctttcctcattctaaaatgtttcctcgttctaaatgccaagctggttttgaacaactgacctcaggtgatccacctaccttggcccctcaaggtgctgggattataggcatgagctaacatgcccagccctaatctgctcttcttagatggatacttgtcagattgggttaagacccactctcatggcctcattttaacttaattttctctttaataaaagtccaaatgcagtccattctgaagtactgggaggttaagattgtgttatttgaattgaagtgagggtgaggggcaggggcacacaactcagcccataacacgtaggattaaaaaaattcttcgggtccggggaggtggctcacacctataatcccagcactttgggaggccaaggtgggaggatcacttgagcccaggaactggaggatgcagtgagctatgactgcaccactgcactccagcctgggtgacagagtgagaccctgtctcaaaaaataaagtgaagcctcagcctcagcatacagtgaggcagtgtgtgtgtgcagtgaatcgaagttccagtcatcattacttcatttcagggctccacactgccatctgggcatccccaggcctctctggactggccctgccccaccctcatggaggtagcctttacctggcaggcacctcagaggctggtcctatatgtcacatcattgagataaaaagaaatccaaggctggaagcagtgacaaatggtgtggacttggtggaagttgcccagggagatggatgagaatggtgacatcacacatagcacggctttttctccaaaatcccaggacttaccacagtggccacactctgtctctcacctgttcactttcttctgctcgctcgctctctctcagcctcccctgtcccaccttttccatatgcgaagactctcccccagcacccctgtggtggtttaaaagcatggcagcaaactcctcggcattccttccttcagggtggtgcctaagtcccctcccagggaatctgagtgggcctataactgcttcagtcagcagggtgtagaggaagtgatgctgaatgacttttaaggttggctcctaaaaggccatagaggctctgtcactggagctccctgtgctgtgatggaagtctgaagtcttaatgctgaagaagcccaagccatgtggagaggccaggtgtcaaagctctagtgagcatcacagctgagcagggacagggccctctgcttcttgtggagccctctctagattccccacacacagaatccacaagcagaatgaagtggctgtgatttgatgcccctggtttccttgttatgcagcagtagatcactgaaatcaacccccttctaaaggcctctctgcagacattctccacttggtgagaccaaagctagcctaacagggctcagcagcagagaagcccagccattggccaaaaaagccactggctaccatgcagccaggatgtccttggggagccttgatctatcccaccacatcaacatttccacctcagacatgggaaaggcaccaaggtgtgagcatgggcagtactcctagggaaccccaagcacaccccattgccccaagatgcaaatggaactcctcactggtcccatagttttacaatgtgagtctaggaaagcacagatgagccctcttttatgttattgtccgccttggcggagaatggaaacagcaagaatgctgagcttgtggtgcagacttggagatgcatttgtcactagaaccttagcgcgtgcttgtacaaccctggtggtggagagatgaatggacgaggcccctcctttccatagctcatgtggccagcccctcatctaaggcaggggccaaaacagagcaggaatgtggaagggtggccagctgtcctggcttgcctgggcctgaggggagtcccagggcatgggatttttagttttaatattgggagagttttgggcaaactgggccaagttggtcacatgagggtgtggcaagcaaggcaaagatggtttgatcattgcagcccctcacttcccatagctcactgcagagcctgtgtcatcctgacaacaacgatgtggaaggtgagacatctggcagcattttgacttcatgaactgggaaacgcacatgggtggaggcgcctgcccacgctgcccagtgtctcatggtggccacaagaggctgcggctcctgttgctcaaacagggccctgttcttgtccagcatttccacagcaaggcccctgctcacaccagacacttccagggaacccttggccagatgacagcagttgctctggtagttaacgttatgggaaacagattctaggaagcgcccatgcatcgcatcacactttttcatctctccttctgtccatccttctgcccactcctagttagggcatgtgtgctccaggctgggagccagggcagcctcatgggtcagccccatccgcaaggaacccatgtctggggagacaggcattcaagaatgagatattttcaggtgagtgctaggcaggcgatatcactgaacatacttaggggtgagtggggaaggaggtctacctaggtaaggaggtatgtgagtctgtcctagccaaataccacagactgggtggttgaaacaacacagttcctgctcacagttctgcaggctgaagtgcaagatcaaggtgctggcagatcccgttccggctgaaggcagatgtctgccttcttgtgtccccacatggctgagagacacagagagttctctccttataagcataccctttctgtcagattaagatgccaccctgtggcctcattgcaccttcgttgcctcctaaaagccccgtttccaagtacagtcccattctgaggtcctgggagttaggtccttaacacaggaattctaggcggacacaattcagtccctagcacccccgttcccagttggatcaaggcctcaaaatgaagacaggcttgtctcacctcacctgtccctcttctgagaagctgcaagactgagagggagctggagataataggttgatttgggacaaggacactacagggtgaggacatggctctgtgtcccaaggttttggggcagcagactggtggaggaccatgctcaagggttctgaaggggagcagcttccttggcagcccgaggcccaagacacagagggcagagcacacagatacgagctggggctggatacattgctgactctgggtagaaggcgatggaaatgagggtctgacgctatgttcaatcctgtcccaccctatgtgatggctggagggacaagggaaccccagtaggatgatggattcctaggggttgcaaaaggaatgggcagggccagccatcactgagacagcacccaggcggtctcgtaggttttgcttagagactgtgtgctccacttgccattgccaggagaggcatccacccaggcgtccatgaatacatggatacacacaaggaggtgcagccacatgatacaatgtgattcagctaaaggagagtggagctccggtccatggaccttgcggaggcaccttgagaacattgttccgggtgaaagaagccagacacaaaataaaatattgtatggttacaacaatgtggaaatgtccagaacaggcacatccacagagacagaaaccagatgtgttactgccaggggctgggggcaggagggaaaatggggatggcttctcgggggaatgaggtttcttttgggagatgagaatgttttggaagtagatagaggcgatggctgtgccacattgtggatgcaccaaatgcaactgaattgtactctgaaatgattaattgtacattgtgtgaatttcacctaaatttaaagaaaaaggtgaccatgagagcaaaatctgtcccagccatggaaacccccgggctcacctgggtacacttaaaccgaactctctggccccttgctggtctacctccccagcccagaccaacaaatagcaggtcctggagatatctgggcagcatccacacatcatttccatagagcacatgccaggggccctggcatgagtgggacagagatgagggagaccaccgcagagagccacaggatagatactgtgctgctcacaaaggtcctttaaaattttccagcagcggctgggcatggtggctcatgcctgtaatcccagcactttgggaggccaaggtgggtggatcactttaggtcaggagttcaagaccaacctgggcaacacggtgaaaccccgtgtctactaaaatacaaaaaattagccaggagtggcagcgtgtgcctgtagtcccagttactcgggaggctgaggcaggaaaatcgcttgaaccagggaggcggaggttgcagtgagccaaaatcacgccactgcactccagcctgggcgacagagtgagactgtctccagaacaaacacaattttccagtagcaacacttaaaaagtaaaaggaggtgaaattatgttttctctttgagacagagtcttgctctgtcgcccaggctggaatgcagtggcgcaatctcagctcactgcaacctccgcctcctgggttcaagcgattctttggcctcagccttgcaagcagctgggattacaggcatgtgccaccaagcctggctaatttttgtatttttagtagagatgtggttttgccatgttggccaggcctgtctcgaactcctgacctaaagtgatccacctgcctcggcctcccaaaatgctgggattacaggcataaaccactacgcctggcctgaagttaattttaataatatattttacttaacccagtatatatccaaaaagtatcatttcatcatgtcaattagaatttatgagtgagacataggtgggagttgaacaatgaggacacatggacacagggcggggaacatgacacaccggggccggtgggagtcgggggcagtgggagggatatcattaggagaaatacctaatgtaaatgatgagttgatgggtgcagcacaccaacatggcacatgtattcctatgtaacaaacttgcacattgtgcacatgtaccctagaacttaaagtatgataataatttaaaaaggaatttgagatattttaacattctttttctttctttctttttttttatttttttgagacggagtctttctctctcgcccaagctagaatgcagtagtgtgatcttggctcactgcaacctccgcctcccaggttcaagtgattctcctggctcagcctcccgaatagctgggactacaggcacaagccaccacacctggctaatttttgtaattttagtagaggcagggtttcaccatattggtcaggctggtgttgaactcctgacctcaggtaatccacctgccttggcctcccaaagtgctgggattaaaggcgtgagccaccacacccagccaacatcccttgtctcccctcccctcccttcctcctcccctccctcttccctccccttttcttccccctttttgagacagactcttgctctgtcgcccaggctggagtgcagtggtgcaatctcggctcactgcaacctccgccttccagtttcaagcgattcctctgccttagcctcctgagcagctgggactacaggcacgcaccaccacggctggctaattttttgtattttagtagagacggggtttcaccatgttggccaggatggtctcgatttcctgacctcgtgatctgcccacctcggcctcccaaagtgccgggattacaggagtgagccactgcgcccagccaacattatttttcttcatactgactcttccaaattctctgtggggttttgcacttggagagtatctcacagatcctgaaacccagggactcctagaaacttctctccaattctttagagagaacgctgcagctcggaggggcctcggggggatctggtgtgacttttcccatttccacagaggaaacccagcgaagcctagggaggtcctaagatgaccctggggccccagtgtaagcttgcagcggagccaggaccaaatgcctgtcccaccagccctcgcctccctgctagggcccaaggcgtctctgctcttccggatggagaaagaagctgccttttgaggctgcatctcatcttgtggtttggggttggagttgggagagaatgcctgagaaaaggtcaggtgtggtggctcacacctgtaatcccagcactttgggagcccgaggcgggcagatcacgaggtcaggagttcaagaccagtgtggccaatatggtgaaactctgtctctactaaaaatacaaaaaatagccaggcgtggtggcgcatgcctgtagtcccagctactcgggaggctgaagcagaagaatcgcttgaactcaggagactgaggttgcagtgacccaagatcatgccactgcactccagcctgggtgacaaagcaagattccgtctcaaaaaaaaaagaaaaaagaaaatgcctgagaagataggaattggtggagatgaggggacacaggtccccaggcctcctggacttacatagcctgggaaggcggagtcagaagaaggaggatggtatgcgggaagagaggcaagaaagatgccagcgagggagaacagcagggggcatgggaataatttgggatttgcttccacggattgggggggcgacaggtcttagcttcctgtggccactgtagcaaatgaccagaaatggggtggcttcaaacagcaagcatttgttcagaagaatgaaatcagggtgctgggagggccgtgttccctgagaggctctggagagatgctccctccctctcccacttctggtggctgtggcctgcctggactcgtggccttgtcacgccagcctctgcctcatggttgcacgtcagccttcttggtctcaactctccctccgcctccctcgtataaagacacttggttgggtttagggcccacccagataatccaggatgatctcctcatctcaagatccttaatctcactgggtgtggaggctcacgcctgtaatcccagcactttgcgaggctgaggtgggaggatctcttgagcccaggaggtcgaggctgcagtgagctgagattacaccactgcactccagcctgggcgacagagcgatatcctgtctcaaaataatcatcatcgtaatgaaagatccttaacctaagtacattgacagatatttttccaaatatagtggcactcacgggttctaggaattaggatgtgggcatgtcactttgagggtcaccattcaacgcactgcaaagtgacagagtgagaacatcagtccaaaagtaaggagagaccctgtgccatcagagacggtgtatcctgtggagtcattcaggcaggtgacttggaacagggagtttcagcgtagtgagcccttggtgcctggcttaggagtgaatgagattaggaggttacagaggccttcctaagaggccccaagagtcttccagacctcagcacccccatctggaggggagcagtggggccctgttgccctcacacctgtgtctctattgtctgaaagttcagtagaagggagttcaccacctctgtcacctctgtcagctcctgcctgggggccactctctcctcacccagacacaggctccccagccagatcactctggaactttccctggcagctcagagtggcaggagtcagagctgtgttgacattgcacatttttgaacctgtctacagcagcctgggttgggcacaacctggaattgccctcaggagctgccttgggcctgtgcatcagtgaggccagggcggccgcctctgtactgacctgccagtcggctggctcttcctgcttccttcctgctgctccaggcctcccaggtctagcacacgtgcattcattgtggccaggagtcctgcattgaggctcaggacacctgggtctctgtcccacctgcccctaacctgtcaccccaccttggggccttggtttctctcctttaaaaaggagttgaattatggaaggtttcttccagcttggtcctctgtacaggggattgtgccaagcatgggtggtgggcaagagttaaggaggaaggtggctggctatagtggctcacgcctgtaatcctagcactttcggaggccaaggcgggcggatcacttgaggtcaggagtttgagaccagcctggccaacatggtgaaactctactagaaatacaaaaattagccgggcgtgatgacaggcgcctgtaatcccagctgctccggaggctgagacgtgggaatcacttgaacccgggaggcagaggttgcagtgaactgagattgcaccactgcactccagcctgactttttgagactctgtttcaaaaaaaaaaaaaaaaggaaaaggaaaaggaaggtgatggcaggtaggggtttcctgagagactatgaggggagcccagggccagagagagcagggaaggcccagccagcgactgctatctatagagtgggccagtgcctgtcaggtcactgtatcctcccagcaaactcctatccttatttgttctggaatgttctcagtggtgtctggtggaattgctctcctaggtataagctcagattgggtttctgcccatcctggggtcagctgagacagggtagtgtgtgttgtagggagaagcactgagctgccctctgacatccttcggctacagggaccaaaacgagtttaggaagggtgtgatctgatacgtttattcttttttttttttaattttcatttttcttttttttcccctcttttttttagagacggggtctcgtgttgctcaggttagagttcagtggctattcacaggcatgatctcactgctaatcagcatgggagttttgacctgctccgtttccagcagaggctggttcacctctccttagtcaacctagtggtcccctgctcccaggaggccaccatgttggtgctgaacttagtgtgaacacctgattggcatagcacactacagcccagaactcctgggctcaagtgatcctcccgcctcagcctcccgagtgactggactacaggtgtgccccacgacacccagctaaccattttttaatgaaaaaaaagtgtagttttctccatttttttcattcaaaaatctttctttcagctaatacttataagcacctgctttgtgctaggcttatttgtgcagtaaattctttttttttttttttttgagacagagtcttgctctgtcgcccaggctggagtgaggaagccctaatatataatcttcagtcaactgttaatctggaagcctcaccacattgctttttggattagcagaatgccatcctggggaatcccagcagaaaggaagaaaggagcactgtcagtcttactggtcacccctggccaaggcccagtcatgacccttccttccatctccatttgatcccatcataaacctcaagaaaagtaaaaagcatcatcatcttaggaaaaagtgtggcgggggtgctcaatatgttgatcatgttatggcaagactccagattatctctcttcttcttttttttttttttttttaggcggagtctcactctgttgcccaggctggagtgcagtggcgcaatcttggcttactgcaagctccgcctcccgggttcacgccattctcctgcctcagcctcccgagtagctgggactacaggctcccgccaccatgcccagctaattttttgtattttttaatagagacggggtttcaccgtgttagccaggatggtctcgatctcttgacctcgtgatctgcccgcctcggcctcccaaagtgctgagattacaggcgtgagccaccgcgccgggccttgtgcattaaattctaaaagcaacgctcgtacggaaatgcaggcattttgtgagcagcgcctggttccctcctggctgtgcagctgtggggcctggctgtccttactctccagtgcaggtggagctcctgtggaaagtgcaaagggtcctgtttccagggctatgagtgctgtcacttgtcacttgtatgcttgcgccagggcacccagtggggcaggcatggaagcttgttgcagcagcaccctcctccctgcccctggaaactaacatgacctcagcaggacaggccatttctgggaggcagcctgtccacatggaacacgttgccatggatggtatgatggtggtcagctgcatgggtcatctggcgcaagactggcccaggcatctctgatcttagggctgacaagcgctggatgaagagtaagtggtggtctgggctctggccccagtgacatcatgcgcttgcagtggccctgaatagccacccctgcttctgcgccttctttctctgcttagaaatgagccctgccatcacgctggacccttcatccactcaatatttttcttaagtgggttcattctttgaacactgaaacatattatttaaaagggaaactggccgggcgtggtggctcatgcctgtaatcccagcacttggggaggccgaggcaggtggattgcttgagcccaggagttcaagactaacccaggcaccacaggaagaccctgtctctacaaaatatcaaaaaattagctgggaatggtggtgcatgcctgtagtcccagctactcaggaggctgaggtgggaggattgcttgagccctggaggttgaggctgcagtgagctgtgattgtgccaccatcctccagcctgggagacagagtgaaactccatctcaaaaaataaatattttatttagaaaaggaagctctgtgcagccacctaaatggaacacctgtatcatgtgcaggtaactgcaaaagtaaatacaatgaagaccaaagccaaaatattataaaattccagatagacttggctgcctccctacatctcggtgcctgggctctgcatttgttggagttaggggcgtgctggcctggagctgagccctacttcacctacacaggtgactggaagatccttgaagagggaggctctttcccagcaggtgaggggtgccattgaacttggggctttgctctatctaggaaggcctgccagccggcgtgcctctgaagaaatgctcacctgtgagcagggagcgctccctaaacgctagtggtgggattctccctctctccactgggcctcaaaacacaggctctttgttcacatggctggagactgccgagggtttggctgctgctcaggaccgcctggattcctcacagagagtggcaaggaggcatcaggatacaccaggaaattcccagaaccataaggtgggagacccaggtttgagtcctgcctttggcaccaagccagctgggggactttattattcatgcagtctacaaatatttattgagcatttcctgtgtgcctgatactgtgccagggctgggctttggcagtaaacaagatggaaatgaaattgctttggcaatttggcagtctggcaatttggcaatgaacaagatggaaatcaaaccccttgccctagtggggcttttattgaagtgacaggagatagtcagcaaacaaggaaacaagtaggaaacttccaagtagtgatatgggatcagaataagatggggtaataggatagagtgcctagggagccagcattagatggggaggtcagggaaggcagtgtctggaatatgggtgtgatgcctggagacatagcagccattttgtgaccatgaggcaagaagcatgaggacaaaaaacaacatagcaacgatgctgcagagggaagttgagaagagcctaggcctttgatgacatcattgcaccactgcacaaactctggaccttcatcctccaggcttcatgatacatgagataaatgaaatgccctgtgggttaggcttttctagcagctaaacatgtctttaactaaaacagacttaaacgacaaggaagagcaaactaggagaatatgtagaagaagaacatttcaggtagagggaacacatgtgcaaaggccctgaggcaggaatgagcttgaaagagttgatgaacataacgtcagtgcagctgaagtgtgatgaagtggagggacataggtaagcagaggcagcattggggcccttgggttttatccttcatgcagtaaataagagggcattggggacttttgagcaggagagagacacgatgtgattgaggttttagaaagctctttctggctgctgcatggagcccacagggggcaagacagcagtcaggccaaaaggtcaagtgaggagtgatggactctggcctgactcggccacagcagagatggagtctgggggccacgcatataatacaccacacacacctcaatacacccccttctgcccaggcagacccaggttccagtcctgaccctgccacttgtcagctctcaaacctacccattttctctctccttactgccccaatcatagtgcaggacgtcatcgtctctcacctagcatctgccacggccttctaatctgccttcctacctctagccttcatccctcccatcctttttccacatcccagccacagttatatattttttcttttctcttttttttttttttttccagatagaggttcactgtgtcacccaggctggtctccaactcctgggcccaagtaatcctcccacctcagcctcccaaagtgttggcattacaggcgagagccactgtgcctggcctagccacaataattcttttaaaacaataaatgtaaccatactgcttctctgcttagaatcttctagtggagcctcagcgtcaagtctagatccctggccatggcctgtgtgtttgtcagggcgttgtcagctgctggagcaaatgggctgagaaatgcttcatagttaagatgcagttcagtctggttcttcctcactgtggtgtgaagtaggtgtctcttgccagtggatagctttcctccacgcggtgattcagggacccaggctccaactgtcttcttccccttctctatccagccagtttaagggaagcagaggtgagggaggagccctcccactcttagaagcctcagtccacctctgctcacaattgactgcagggggagactatgaaatagtctgtgtatccagggaggtcagaaaatggatttttaatgattcactatgagtctcacaacagtctttctttctggcaacgagatagcagtgtgctctttcttctatcacaccctcccccagagggatgaccccagactccatctgtctctgcctgtggccctgcatctcctggaacattccatgctctccgctagtaccatcccgtgatctccaagtaaaatccagttcctgctccctctgaactgactgggggcagttaaagctctcattagggaagggggaacagggacacacagcagcccccacaccacaattgcagaatctgactggcggtgttgtgaagctccctgtcctactcgtggagggatttcccatctctgctttctgggaggcccctcctcatccagtattctccgtggcaacatctgaggtggggaccacatggtttttgcagctcttttcctgcctgtacaagggtggaggcccaaggcttgttctacaatgacaggcttgtggtgtctttggcaatacaattccctccagattttagggagttttccttccaataagttccatgtgaccacacccgaggtacttttctactgtcatcttccagcagctttatttctttgcttccttatttcccatgtctctgtctctgctgtctctgtctgtctgtgtactgacactgaccttgagaacatctcaacagttagtggggcaagaccacccacttcatttgatccttgctgcaggattaaggcctttgtagacctgagagttttaatgagcctttgctacttaaaacctttttatttttatttcctgctatttgagatccattcacagttcacttttccaacactacaaggcctcaaactcttcatatttccctttcttctatttccacactgtttatatcttgcttgagtgcgtctctgtctcacaataccttactgtacaccaaaggaatgactaacatacttttttttttttttgagatggagtctcgctctgtcttcaggctggagtgcagtggcacgatctcggctcactgcaacctccgcctcctggtttcaagtgattctcttgcctcagcctcccaagtagctgggactacaggcatatgccaccatgcccagctaatttttgtatttttattagagacagggtttcaccatgatggccaggatggtctcgatctcttgacctcgtcatctgcctgcctcggcctcccaaagtgttgggattacaggcatgagccaccgcacccagcccaacatacatttttattgcagctcactcagccaccttcttctggagctacaggcttacttctcccagtcttcccttcaagctattgtaggctacaggtctaacaaacatttcacctctgcatgacataagtctcccactttccattctgcaacatctattttcatgttccctgctgcctggccactaagccaatggtacatattttaggtttcaagttatggcggcactctattttgaggtattcattagtgcacactatctcctgtaacaaatagaccccaaaatgcagaatgattaaaacaccacagagatgtgtttctcacataacaagccagagtgagagctcattagtggcacgtggcttttctcctgaaaagctgaatgcagtgattcggaaacccgtgttctttacagttagtagattcacccttcccaaggcctagtaaccaatggtattcagcggtggaacgggaaagagagagcctggagagagcccatatccatactccttgcagaatgcagacctcaggccccatctgctgtgtgggtggcaggaggtgcagctgtgtgcccatgagtgaaaacccattgaactgctaacaatctctcccacacttcagggctgtccatcatccagccatcccacctctccagtctcatcccttgaccttccccctgccagcctcactcatcttcattcgattcctcaaggatggcatgactctctcatctctaggtctttgctcatgttggttagtccacctggagccctctctccctcactgttctagccattcacccagccagccagccatccactcatccaccaaaccatccacccacctactcatccagccatccacccagccatccattcacccattcatccagtcacccacccatccacccatccacccatccacccatctacccatccatccacccacccatctatccacccattcatccactcttccatccatctacccactcatccacccagccattcatccacccacacccatccatccacccactcactcatgcatccactcacccatccacccacacatccactcattcatccacccacccatccacccactcactcatccacccacacatccactcattcacccatccacccactcatccactcagccatccatccacccacacccatccactgattcacccactcatctgcccacccatccatccacccactcatccacccgtccatctatccatccacccactcatctatccaccaatccatccatccactcatccatctgtccacccactcatccacccacacccatccatccatccacccactcatctgcccactcacctatccttccatccatccactcatctacccatccatctatccacccaatcatctacccactcacccatccaccctttaatccatacactcactcatctacccatccatctatccacccacccatccacccagccattcacccatccacccatccatccatccacccacccaccatccacccacctatccactaattcacccacccactcatccattcattcatccatttacccatccatccatccacccacctatccacacacccatccactagttcacccacccacccacccaacaaatgttttgagcactaaatgtgtgccaggcactgatccagatgctgggattctgcaatgaacaaaacaaacaaactcctgctctcatgcagcttgtattctagctgggagagacaatgaataataaaccagataaaataaataaatcatacattgtgtaagaaaaaatcaatggctggaaaaaaatggggcagggtaaggggatcagaagtggaggaggcggcaatttaaatgttaggcaggggagaactgggaaggaaggcctcatccagaaggtgatcattgggcacagacctgaaggaggtgagggacggagtcatgagcatatctaggggaagagtactctgggcagagggcatagcctctgaggtgggagcagctttgcagatacgaggaccagcaggaggcccatgtggctggggtggagtgagaaaggagaagagtagtgggagatgaggtcagagaccatgaggcctggatcccttggggcctgcaggctgtgccccttgcaaagctccctcatctttcaggccccagcccacatctccttcttcaagagagccttgcaagttctccgcattgggactgggtgcgtcgcctgcgtgtgcaccaatagtctggtcacaaagtttcttgctacgtgtgtactttctcatccccctcccctgaactcgggtcctgtgaagatagagccccatctgcctgggtcaccctcactgagcacggtgtggatgacatatctccaaagggcagtggctccacctgaacaggatgcaggttctctcctcatggcttgttgggaagtttaaatgagacgacctagtccagggcacctagttgaactttttgtcttagttggcagatgaaacaccaatacatttttatgctctggctctcctttcctagattccagaatggccatgcagaggcttattcctgcagtctcagtgtctttccacacccaatgtatgaccccatcaagtttcctcttgaatcaggacaactctcaggaacaaaccgctcaaggggccccgtctttcaactcctgggttccaccctctccctaattcagaaaatgatagaatctcacccagccagatctcccacctgactccatgtttaatggcctacaagtgtctccctcgaccctcagacaagctcttcccaagacaagggaccttttacttttagcactccagtgcatgatgtgctggtattagtgatggcagatgagctggtattgctaataaccattatctcacccgtccacacatccatccacccacttacccatccacccactcatctacccctccatctatcacccaatcatctacccactatccatccattcttggtctgcctggttctggggtctgtcatcctctagatgctttgcctcagccttggtatcaatgaactggcatttatgtcatatgccacagcccctgcaggcaagaatatttctccttgccctgattgtctgttggttgccagcccttcccttctctgatcacagagaagctggaagcctgcaaactacatttgctagagcccttaccagtgggcttccaatttgtttctgctggtaggaagcactgatcaatcagaaggcagtaaagttcctggatctgggggtttttttagtggtggcaacagcaggcatgcacacctgggtcttgttcagccatcaactttctaccaggagtaccctagcagccctgtgatccccagacgcttctgggtgacacctgttcctccagcctccatgtaaaagcagcttcctgcacttacttaccaatattttggcaatctcacctccactctcactcctctcatccttccaacagttttcataaccagtcccctgcattaaatccactctgaagtgcctgggcaatttccattttcctgactcttcactgactggtaatgtccttggtagcaggaatgacttcctagaaatagagccttaatgctggaaatcggggactggttatctgcctggattgggctggaacgcagtaatgacctcactgtcagaggggatgtggtaccctggaaagtcacagcattcagtggcaaaactagtcctcacaatatcacctatgttaagtgcctggcgtgaagtgtctcttgaaggcaaagtttgagagaccaaatggctgcagcccttcatgtcatggggacagctggagagactggtggcttctgactacactggagtcagaagtgataaacccagctcaaaacatggacagaaaaccagagagcatctttgataaccagaaaagaatctctttaatatcttgtagccgtaagactgatacaactgaaaacataaccctaaatttgattctgcaggttgcagttacaacacaagttgaagtcacagccttgccggaactcttatgtaaagtttagggcattggatctggaaggagtgggaccctgagaatcgtaaagggatatttgggtggacttgagcaaatccaagaaccctgaactgaggaagagcagtgtgagtacatggtcaggggctccatgaatattcctgcctgcaaccccagcttcacaggcaattcagccttctccacactggcccggcactggctagctgctcaccttatggctcgaggcaggacccccccgcagccttgcagctgagtgggaagttgctggaagttgtatctgtttattgcttttaaggctgtcatgagcagacataagacctcatatcacacaagcttgatgccaccaagaggacgggagctgggctgggtcctgagcccttctagcggtgtggctttggcttgtgacccccgactcagcctcagtatcatctatcaaataggcctaataatgggcatgtcccgggactgctgtgaaaacgaagtggagtaagattgcaacggggcctggtgaggtggctcacgcctgtaatcccaacactttgggaggccgaggtgggcggatcatttgaggtcaggtgttcaagaccagcctggccaacatggtgaaaccccgtctctactaaaaatacaaaaattagccaggcatggtggtgggcacctgtaattccagctactcgggaagctgaggcaggagaattgcttgacccgggaggtggaggttgcagtgagctgagatcgcacctctgcactccagcctgggcgacagagcaagactcccatctcaaaaaaaagattgcaacaggcctggcaatttatctttcattctgagtagccatgtaacccctagtggtaactaggagaaattgtcctccagcagtctgtcccctccctcagtagctggggcggaatgagatatggccctgggcctggtgcaagattttcacttgttttggaagcattagccacagcttttccttgatgggcatgtgttatcatgaggctgggcctcacctccctgcattggaccagaaattctaaaggaagcaacttcttatggcacagcggatctcatgcatggcatcactgccccttccctaggagaccgcacaaagccactcagcttcatagctgggctgtggcctcagaggcttttgtgcctggaggtggcagggaactgtggtgtgggggctgggccagccgggaaggtagagccgcccagactggggtctgggttcctgaagtcactgttatcctgcagggagacctcagccaagccccagtgacacgcagggtctcgctctccacgctgaaggctgtgctgagggctgagcaaaaagaggccagacaccagggagggaagcccgcctccccctccccacctcgacctccacaccagttaaggctgaccggcaggttgctgtgggggaagcgacagcgtgcagacagcactgcatgccaggccacaccttttatggaaatgttcctctgagacctgttgatgagcttggagaatgaggaaggggacggtccagcggccagctgggtccacaccctgccgccggccctgaggagggaaggcacgagtcactgcctattttgacccggcaagaaatacaaacccacagggtgaggcgggcagaaaagcagctctgtgggagacctgcaggcccctgagcatcccctgccccagtcaggttctcgcccaggtgcataaaccggccccatgtggcggcatccttaccaaggacccccaggtgaccggacaggaggggtgaggctaggctgccaggcagacagggtagcaccagatgggatgggctgggggctccagggcacggtgtctgtggcaacccaacctgggaagatgttattgctctgctggagaccttgggccaggccccgcgaagccctgcctagccccttggcgtgggttagcggtgctttaaggcagcccgaggcgaggaggccaggtcatacctgcgggagcttgatgaggcctcatgagaaagccctagtctcagttcctgggcccggggcctctgcaggcctccaccaccccatgctgcctagttcaagtatttgttgtgggctggccagatcaagagtcacctgctagaacacaggggtaggaatcttaggtgggagtgggaacagagtggcaccaggcccattccctcctggctctcaaggtccatgctggccctcaggggcttcctgtgggggactctttgtgctgtcactgcaagggaccctcctgcggatgggctggaggccacagggacatggccccagctcactgagctcctgagtggtcatgattgactatgtgcttgaacttggggagggacgtgtagatgggaagggggtgaccttagggagggtaaaagaggaccctagctctgctgccctgggacagtaaggggaaggcccaggcctggctgcccatcctctgtgcctacaacctgctctttccttaaattctgccagcaatgggccacccctagccccggagcagctcagcccacctcctgccagctgcatctccctggaggcccagggctttctccgacctctcacacaagccctttgcaaaagagctgacttcctggaggccagggcaggagcatctgccacaggtcaaggggcagggatgtcgggggtactcaggatggtgacccctcctggtccatgctgtgacccacagcaggggtttcgaggagactccggggctcggggacccccatcggcaggctgccaggcctccctgcacatgcaggtctccgtggtcctgcgtccaggcaggaaggcccctgggctgctgttgctggagaaggaatgtggggggtctcggtgccaagactggggatagcaaggaggtgagtgggaaatgcaaccacaggccagccagcgcccgtgcatggagtcaaagggaggagtcagcatggtgaccactgcccctgcaccgggggaggaaggcatgggggtcctggtgaacctctccctgtactgcccagagcccagcctgactccccccgaagccgggtagggatgcatcactccgactaacaaatgtctcagccctaaagggcccctggctccaggtcaccctccagctctacagaagggcagggacgaatctgatccttgttagcactgacacaagagggcgggacctgagtcagccccaggggaagccagcatgccctggaaaggctggtcccaccaaagcatgctagtgtgtctcccaggctgcacccaggaaggctgggttggggaggagcccagggccagatgggcagcaaagtgtatccggctgtagccagccacaaaagaggacactgatgtctggcagcagcacagaaacccctgtggctgatgtttcttcctcttggatgctgagggtggtttttggagaatagtcagcttcactcccaccccagccccaaggcatctcctcggagaaggctcaggcaggtggccaaggccagcaaggggcgggcctgcagctgctcaggcccccttggatctcctcctggcagacaggggtataggggatagcagcccatggggatggggccttggtttcctgcagaacctacacgagaggccaaaaaaaagatgggggtaccaaggagaggaaaacacccccggcacccaccaccagcccgcctgtagactgcatcctgtgtgttcacatgtgtgaaccgcacgtacggttgagcctggccagtgctcagtccttcactctgctggtctctgtcagggagagctgaccctttccagggccctgcctgcactgggcatgggggtctgagaaaggggcagcaccgctggcaggtggggtctggcactgccaccctcagaagctggcacacgaggtttcttattgctcctcttggctctggagcacaccttcttaatttccagaaaggacacaggcccaggagaggtggcagcaggggtcccacactggccctcctgctgatctccaagtggagcccggtgggcaggatgcaggctggctctagcccctacgtgtgacccacaggcctcccacgaagccgctggtctctgcagagtgagaggtgccgggactacctggcctccttgccgcctcggttaccgggtcaccgcccatcattggtcagctgcctccagggatctggacgtggggcacagatgagtgtccttacaaaaataactctgagtctgttcccagtgggaccaggttcctgagagcacgtggggccaggcaaaggccacgtggaagagtccggcagggagcgctcccgcctgcaggccagggttacggctgcaggcgctccaggtactgcggcagggggttctccttgacgtacttctggatgtaccagcaggtgagatgggccttcaggtcctcctccaccacgaagtccagggcggcctgggagccgggcagagaggagagtggtcagggcctgcagccggcaccagaaggtagcattgtctgctgcctccccaggcccggctccctggccacccttccactttgcccaggtcagtaactcccttgagtttcagtgtcacctgggatgatccccacagactggtccggtacacaaggaaaaaacacatcacctctcccctacaagcccccttgccccaggcagcatggaggacaaaggttgccctgcaattctcctggcggggtgggggtggaggaggggaagccggcagacggcccagctaagtcccagcagcagccctcaggggagtgacggtcattctttgctctggctgtaactcccttcattaagcccaaacctgctctccaggcagcctggggtttgggatgccctgaggatgaaggggttgggggcaggaatggggctcctgtgaagcacctgccacacaggaggtgtgtgaggatcttggaggctcagccacgccagggtcttgcagaacaggagcctgggcccagaaaggcggccactggcccagagaggacccagggccaagaagcaggctgaagtggccaccagggccaccgtctcctcggagcgaaggtggcagcccccatgtccccgtccccgcttggccctgccacctgcctgccctaccttggcaaggtgcttggcgatgccacgcccacggtaggcatctgggacctcggtgtgctgcaggtccacgatccgcttgcccacgtactcatagagcaggacggcccggtcatgacatcctgggggttgtggagacaggtaagcctatgctgactcccatcccagcggactcaggcaccaagacgggtggagggacaggcatttggagtcattcagctgctacagctgaatcctgaataacctctcagtgcctcagtctcctcatccataaagtggaggtacaataaaatgtccttcatagggtggtttggaggattaaatgaggtaacctctgtgacgtgcttacagccatgcctagaacacttgagccccacatgaacctttgctactgcgtcagtcctagcatcccagggccctgccacccctttctgtagccctgctccctgcatccccaccccaccacatccctggatctgggagtcccagaacccagcactggacacagaacagggctcagcaaatctgcaactaaggcagagcatgaagagattagagaggcagcgctgcgccacgcatcaggaccacctgctggaccctgagagagacgcagcaggaaagatcagaggcctgtggtagagttcatgagaaactgacgctgggcacaggaggcaggaacaaacgggttttcacactccaccaggcctgccaagcctggagctcaccagtccaccccaaactgctgctgggcaaacaattaactgaactttttcctaatcacagtttttagtgtctcatctatttgtctctccacctacccatccatcaacccacccatccacttatccatccaccaaatgtttcctgagccccaggtactgtttcagatgctgggagtatagcaacaaacaagctagacatggagtcctacccccatgaaaccggaaggggagaaagagaataaacatgaaaagcaagtgatgtgtaggatgccagggaatgggggcaggtgaagacaggaaggagagggcaccagccattctgagggaacagtgttctgggcagagggaacagccagtgcaaaggctctgaggcaggagtaggcctgaatgaggggccgctggagtggggtgggtgaggggaagggcagagatgggggcagggaggtgatagggcaggtcctgcagagcctcctaagccttctgagctgggcgccactagaaggccctcagcaaagggacagatgtgattcactctttaaaatcatgctgtgtttcatgagttttaacttcaaagccccagaaaatctgcccttaaagcctgtgctgggcaacacgaggggaaggctgacaggccaagaggtccaaccactagtccagggccaccggaactggggccaacggcagcaaggaggccttctggctcttggtatctcctttgattctccccaaagcctcaggagagtggctacaattcatctccccatttccagatgaggaactactgagatgcagggatccaagtcacacagcaggccaagatgacgctggagcccaggcctgcaggtcctgagccacagccattctttctgctccaccgacacacctgctacttcctgcacccgccatcgcctaggcacttccctctgcctgatgccctttctccgttcctgccaggcccagctgagggttccccagccccactcccctcatgcctgcagccccgcccccacaccagccctgctgcctcctccttgtgggcctgactgtccttctgtggactatgcctgccaccctggccaaggcccagctgtggccactgccgcctgtcctggctgcacagcaagggatgtggttcttggctccccacctgctggggttaattcaactcacccaggacaggagagcagagatcggaggctattctgggactgactccgtcaccaagggagctgcctacctagcctggccatttaattaccccaggctcattgagggcctactgtgtcccagtagggtttgggctgcagggcaggcagcagcgaacaaaactgatgaaactcttcctcatggagatcttacgtactgatgaagacacacaataagtaatatcattataaataatacaggggccaggcacggtgacccactcctataatcccagcactttgggaggccgaggtgggtggatcacctgagttcaggagttcgagaccagcctggccaacatggtgaaaccccatctctactaaagatacaaaaattagccagaaatggtagcgggtgcttgtaatcccagctacttgggaggctgaggcaggagaatcacttgaacccgggaggcagaggttgcagtgagctgagaccgcatcattgcactccaggctgggcaacaagggcaaaactccatctcaaaaaaaaaagaaaaaaaaaaaaaaagctgagcatggtggtacacacctatggtcccggctatttgggaggctgaggcgggagaatcacttgagcccaggagtttggggctgtagtgagatatgattgttatcactgcattccagcctgggtgacagagtgagaccctgtctctaaataaatacatacatcacagaggccacacaggtgataagctgacaggtgccaaggatcactatacagcagaggaggggtggggaggggcagggctgccactgtaaagagggcatacaaggaccccaaaggacatgtggggtatgagccgcccactggtgagaacagcacgtgcaaaggccctggggtaggaggttgaaggaagagcaaggaggccagagtggctgggcccaaacaagccgggagtgagggttgggaaaccaagtcagagatcctggggccagaccacacagggccctgcaagccaccaaaaaaacctcagcttttgctccagcagtctctgcagagcagggaggtggatacaagaagcctggcaagctcattactactcctctgtgcacaccctgcgtcagtgtttctggagtagccacctgggccatggatggacctgaccctgggagtcctcagaacttctctgcctcccattgaccctcagtgatcgcacagctcagccactaccatattccaggcacccagctcggcgtagacacccaagaaatgtttgtccaactaaaacaactgctttctgtctttgccagacacacactagggccttgtggcagacctgtggacaactggctggaccagcatgctggccttcccacagccaggcctgcacctcaggctgtggctcccaggagacagcaggacagaagcggtggtggcccaagcgtgtgcagccccagcacagggcaggctcgtgctctgctctctccacacaacgatcctcacaaccatcccactaaacacgattctcacagccccatgtacagatggggaaaccgaggcccaggagggaggaaggtggtggtgatcatcccgggacaggtcagttctctggggcagagaggtgtcgggactggggtaagatcacctggcagagttgagactggaactgagggccctgccctgccctaagcttgctcctgtggctcccaagtgacaagtcctgcccccctgtgctagtctgaggtctggagctctcaaggcagctcttagagcctagcccagataagggcctatggcctggaccaggcctagaggctatgcctgtgtcactgtgagccgagacagcaggatccacagtgcccagaagtgaaagcgtggctgacagtgctaccctggtgtcctgctgtcccgtcatgggtgctgcgggcagtcaggggaggcctctgggcaggtgacgtttgggctcacctggaatgagagtcacggaggtgtatggagttgactggggatagggctgagtcaaaggagggtcttcaggctgaaaggggaacagagggcatctggggtggccacggtggtggtggggctgtatgtgaggaaaagaccgagtttaaatggacaccctacatgggccagaccacatggcactgggccagcgaggagccaggctcctgggcagcaacctcggagcatctggccaggacctgaaccccaccttggagggccttcaaaggccacccagtcacaagtgttacacccatgacacaggccacaaatgcaataccggtcctcacgctcaactccttgtcctgccccaaacctgcctggacatcccaggaaaatgcccaagtccccaaagcttgaccaaggtccttggctcctcctcaccttttctcatctgacctgaccctcggcaggaccgtggacatggctttctaaacatgcctggggtccagctgcctctctggcctccctgccttggtggctgctcccctgcctgtcacctttctgcccagggcctccggggacccttccttctcatttcaggtgagcccaaaggtcacgtgcccagaagcctcccctgaccacccgcagcccccatgatgggacagcaggacaccagggtagcactgtcagccacgctttcacttctgggcactgtggatcctgctgtctcggctcacagtgacataggcatagcctctgggcctggcccaggcccttatctgggcagctctaagagctgccttgagaactccagacctcagactagcacaggggggcaagacttgtcacttgggagccacaggagcaagcctagggcagggcagggccctcagttccagtctcaactctgccaggtgatcttatgccagtcctgacacccctctgccccagagacctcacctgtccctggatgatcactaccaccctcctccctcctgggcctgagaaccccaccagcatcacgtgactggtttgggaaaagttaaagctacactgctcgtgggggacccgtccctgggtctctgcacccccatgctctctctgcccctcctgaacctcgggaccaaagggggccaggaaattgtcaggggaggcgatcacagagaaagaccaaagcttgcagacaggggacaggggcaggacctctgggagatgtggagtctgcagaagacattgacctctgctttctccactcggcccacactgaccccgcaaggagagctggcagatcaaaacgcgaatatacagatgaggagactgaggtagacggaggcagagcccaggcgccagagctgtggcacgggacaaggacaagcagacaccctggccggcttttctggcacctctgtaagtagagcctggatcagggaggtgccacatgttggtggttcattggtagattaggcagagggagctgtgagcctggagaagctcaaccatacgtccctcccctccccagaggaccctggtccagcccagcccaacacagccagcggcctcatattggggctgtgatctgagcacctcccaaagcctggggctgtgatcttagctccactgcatccaggggtgctgagggaggccaggggcagcagctgactctctggggcctcagtcttcctggctgcaaaatgggggttagggaggacgcagaaagttccagggttctgcacccctcaagtgttcctttccttgcagcaagtgggacactcagccctgcctgtgagggaaagggaaggctaaggaaggggctgcccaggaggtgggggtctcttccagctgcctccaaccttcagaaaccgtcctcagatggaggccgggggcttgattctggcttagctgcctacaggctgtgcgccttggtttccccatctataaagtaatgacaagcttgcatttcagaaccaggatatggcatcagacaagcctgagctcaagccttccctcatcacccacaagcaagtcacagccatgcttccttccacatctgtccaggatctagacgtttctcccacgcctgtttgcagtgcctggactagtaaagtaaccacctccctgctctgtcctggtccccacagtttgctccccttagagcagcagctagagggagctggggcatcccatctgtcttctgctcaggaccctcctgggagcctcagagtcaaagccgagcccataggacaacggcttccaggccctgcaccacctgctccccatgacctcttgacccatcctgcacacacaaggcatcgcaggcactgcagagcctttgctcttgctattccctccacttggaacactcttccctgttgcagctctgtttcttgcctccttcaggtcttcacttaaatgccaccctccagggaggggccttcctagacacatgattgtaaatagcagccctgcccaacacagcctcccctctgccccctgcacctctcatgaaagcccttgttttccaggatactttaaaactgactctatttcttgtccatttccctctctaaactgtcagccccaggagaccccgacacctaaaagagtgcttggtacatggtaggtgctcaacaaatacttgcggggtgaatcacagctcttccacctctgtggtgcaagactttgggcaagtcatttcacttccccatgcctcagtctccccatctgtatatgggaaatgcagtttcccctctccctgtggtgtgtggctatgaaataaagtgactccaggtgcccagggcctcctagaacactgtaaatgcttaataaacaaaggtgctcaaacgttttccctcactcagaaccagagctcgcaggaagagaatcagcctagctgtgctatgtggacagcctaggaacacttctgcaccaggagcctggggctacctgacccctcagcctcagtgtttatatctctcagtgggcacaacagcaccagcctccaggcttgccttacaggtcgggaatgacaccacagcctgttgtcctcctcagctcagggaggcctgggctcagactcagacgacccctctctggtcccaagacacacacccaaacccagtggggcctggaagcccagaagagccccaccctgtgctgcacagccactcccttgggggcctctggcctctctcttctttctcccctgggcttggctggggagatgcccagccacatctgtggtcagctatctgggcagtgaattccagaagggggtaagtttagaaatacggctgggcatgtccagccctgaccacggccagctctggagggctgtcctttggctgtacccacttggaagagaaagaaaaagaaaaaaaaaaaaaaaaaacaaacgtatcccctcttctttctgtctctgagtataatggccctcccgagcccacaagggaaccagaggccgctctggaacctcagaagagaggatttgaaagccatgaggcctctctcccagagtcgccagggccccgagtgtcctggccagctgagccctgccagcaccacagcagtagcaggacttgcctctgcctggtggtgtagggttggttgggccaatggtgaagttctgggtgatgctgggcaatcacttcctaaggtccctagcctcagtttcctcatctgtaacacggggtggtatgtcacaacattgtcagggtattgtgacagtcccatccacgaagctgtagtggggcctggctcgacactcggcacattccaaatggcatcggagatctggcagaggcccctcctggctgaagccaaatgtgggtcgcaggagccccaccgttcagggagtcagaccagtcaggacgccatcccagctctgcccaactctcagcctgacctctcgcaagcctttccctttcctggccctccaccttcccttcttgaaaatgggcacagtggcccctaaggaccggtccagcttggacattcccactggggcgaggtgggccacagggagttcatagcccttgtttttgtagttctatttcctacctgtgggacctcctgaggggggatgggctaatcaaaacttctctacactggcagggcgtggtggctcactcctgtaatcccagcactttgggaggccatggcaggtggatcacctgaggtcaggagttcaagaccagcctggccaacatggtgaaagcctgtctctaatacaaaaattagctgggcatggtggtgggtgcctgtaatcccacctactcctgaggctgaggcaggagaatcacttgaacccaggaggcagaggttgcagtgagccgagattgtgtcacaggaacattgtgtcgcctgggcgacagagtgagactccatctcaaaaaacaaaaacttctctacactaagggagaacttgcccttgctttctggcttcacgaatcacgatcgggccacgtttaccagcacttactaatcccccatgagctggtctgatcctttacatttgttacagtctttcatccttacaactagccaatggggtgtgcactggtattattcccattgcagagagggagaaactaaggcacacagaagtgaggcaaatggccagtcccagagccactgaagtcttgatagtgatagccatccccccgcccctcactccccccaggggaccacaagcccctttcgcggtcagccccaggtccgcaggcctcccccgtgtagaaagactaagattcccaggggcagcaggaagccatataccacccgcagaaggggacaggtcacggctgaccaactttccaggatctcaaacaggagccttcagtgggtgcccaacagtcgtgaacaagtgggcctgagcaggtgcgggtcccctgcggctgagacaggggacccgcgctgccccagctcctgcctctgcctttccaggggcccctgtccgccctggcccctgctctcccgggaagtctgcccccgcccagcccgttccacttcccggagcgccggccgcgcccccacctggccccgagcacaacccggcccgcgcccggagctccggccgcccgggaccaccccgcggcgcgcgcttgcaacagccttcccgggcggcgggccggagccgggccgcgggcgcgcgggggacaggcacccagcaagggggcggccccggcgggccccgctcgctcgcagacaaaaggtcggggcgggccggggccgccttaccgttgagccggacagtgaactggcggcgccggcggtcgtgctccacgcggatggggcagccctgctccagcgcgcccagcggcacggcggcagccgagtgcgccatctgcgcgcggggctgcggcgcggcgccggcgggggccggggcgcgcggggaaaggtcaggcgcgcggcggggctggagcgcgggcgcaggcggcaggcggtggggtagttacggcctgggagaccgcaggcggcggcgctgaaagtgacactcggcggcggcggcagcaacaaaaagggtggggggggggccaggaaatcagctgtgaggtcacgtgcggcgcgcagccagtggacgcgcggcctttttgttttgatacattccagtcacctcttaaaggggccgcgccggccgcgttcctctcgcagccccaaacaaaacaacacgggccgccgccgcgccgcgccggctacttttccgtcttgcgtttgtcccacgtgcaactttgggacccccgcaaggagccttctaaaaaagacgtaacaatcttttgtatggacattctaatcgtccccaaggcagccaccatttattaagcacttgctgtgtgcacggcctgtgtatagcaaagccctggcgcacagggcgctcagtaatcactgcgctgagatttatcaccagaagcctgagaaataggtatgcttgactccattttacagatgagcaaatagaggctaagacaagtgaaagacatgcataagttctcacgcagctgaagccctggggctactggtgctaggagtgcgcacccacccgtgttggcagcctgggtggctactggctactgggaaggaattgtcctgtgaagccttgtttgggataggagtgaaatgccacctctcccaaagagaggcgtaaatgcgggaagaggccttggggatccctggatccactccatagatggggaggctgaatcccagaaaggggcagggacttgcttgaagacacacaggactgttggggctcagacttctttgaaaggcgccttaattaggctcctcaaggctcaaccttagagccacaccctcccctcttgctcacctgaaggggcactcctgttgcccatagctgtgcagtgaatcatacaggttacttttaatattttgctaattacggtgcaaacttgatgttcacacccgtgtgaccaccatccaaatcaaaatacagaacactggtggttccctagggccctcttccaagcaatgccctaccctttgaggtaaccactgtccctgacttctagtgttgttgactaattaggtttctctagaccatcatgtaaacataatcatacaatatatactattttattttattttaagacggagtctctctctgtcgcccaggctggagtgcagtggcttgatctcggctcactgcagcctctgcctcctgggttcaagcgattctcctgcctcagcctcctgaggagctaggactacagggctacaacaacaagccggggtaattttggtatttttagtagagacagggtttcgccatgttggccaggctggtttcaaacttccaacctcaggtgatccatccgccttggcctcccatcgtactgggattacaggcatgagccaccgcacccagtccaatatgtacttttaatgtccaatttcttttgctcaatattttatctgtgagattcatccctgtttttgcatctttttcgccactgagtaattattccattgtgttgacaaaaaaagccaaactgtaaaatatttgaagagcttattctgagccaaatatgagtgactatggccctggacacagcctcaggaggtcctgagaacatgtgctggaggtggtcgggttatagcttggttttatacattttagggagacagaagttacaggcaaagacctaatacctgtaaggtgtacattggttcggccatccagaaagtggtgggggcttacagctcataggtgtattcaaatattttctttttctttttttgaaacagggtctcgctgtgtcacccaggttggagtgcagtgtcgccatcttggctcactgcaacctctgcctacctggctcaagccgttcctttgtcagatatatttaccgagaatatcctctgatcctcccatctcagcctcccaagtagctaggaccactggaatgggccaccacacccggctaatatttttgtatttcttttagagatggggtttcaccatgttgcccaggctcaggcgatccatccgtctcaaactcctgacctcatccacctgcctagacctcccaaagtgccgggattataggtgtgagccaccctcacctcgcgcccccaccccacccccccaattcaaagattttctgattggcaagtggttgaaagagttaagcttttcctaaaaagagttgatgtcagaaagaaatactcgagttaagataaggaggggtgtgtggaagccaaggttcttattatgtagatgaagcctctaagtagcaggcttcagaaagaatagatggtaaatgtctcttttaggactttaaaaggtgtcagactcttagtcaaatctctccttaatcagaaaaagacccagaaagggagggggattctccacacatgcaaatttcccccacaagagatggcattgcagggccattccaaaataagtcgaataatatatttttgggtaaaattcgttaatttccttcggggcctgttatctgtcatgcgatgctataccagagtcaggttggaatttgttatcttagtgctacaaagagtctgttttgggtcgggcgcggtgactcacgcctgtaatcccagtactttgggaggccaaggcaggcggatcatgaggtcaggagatcgagaccatcctggctaacatggtgaaaccccatctctactaaaaatacaaaaaaataattagccgggcgtggtggcgggcgcctgtagtcccagctactccggaggctgaggcaggagaatggtgcgaacccgggaggcagagcttgcagtgagcaaaaaaaaaaaaaaaaaggaaaaaaagagtctgttttgtcagtctaattatatatattttatgggtttttttttttttgagacggagtttcactcttgttgcccaggctggagtgcaatggcacgatcttggctcaccgtaacctctgcctcctgggttcaagcgattctcctgcctcagcctcccgagtagctgggattacaggcatgcaccaccacgcccggctaattttgtattacagcgtgctaccatcctgggctaatttttttcagtttcatagagttgggggcctctctgtgttgctctggctggtatcaaactcctggactcaagtgatcctcctgtgttggtctctcaaaaagtgctgggtttacaggcatgagccaccatacctggcctttgctggatcttatagtaggtgtatatttagttttgtgagaaattgccagagctttttccaaagcgggtgtaccattttacactcctgctgacaattttgagagtttcattcgttgtacactcttttccaagttagccattctgaatgtgaagtggcatcacattgtagctctcacttgcggcggcctgttgaatggagatgttgagcctctttttatatgctccttggccatttggatatcctgttgtgaacactttggccaactgttgtgccacagtttttgtggcgcaaatttaatttttttaatttttaaattcattagagtgatttttgttgttcagttaccattcctttgtcagatatatttactgagactaacctctgctagcatatttttattgttatttcaaccagtgtgtcttgtattgggaagtttgtaaacaaaacaaggctagagagtgagtctttacatgcaaggagacagaaagtgattctggggtcaggtaagtccttgacctcagctgagtcatgttggctgcagtcctgagcaagcaagatgtaacctcatgagtgtctcaggtgacttctccatctccagagcacttaagtggtttagggaggccagaacgtgttcctgaaatctcttttttttttttttgagacagagtcttgctctgtcacccaggctggcgtgcagtggcgcaatctcggctcactgcaagctccgcctcccgggttcacgccattctcctgcctcagcctcccaagtagctgggactacaggcgcccgccaccgcgcctggctaattttttttgtatttttagtagagacggggtttcaccatgttagccaggatggtctcgatctcctgaccttgtgatccacccgccttggcctcccaaagtgcttacacgcttgagccaccgcgcctcctgaaatttcttgaaccggccatactcgttccctcctctgggcctatgcatgtgctgttgtccaaacatcacctcctctgggaagccctcatctctgcagtcacatttatttagtgtctgttccccagctatcctagatccaggacagattcctctctcatcagtccctggcagagcccagcacacaccagggccagttaaaagccagggtcttccttgtctctggctccctttcttctcccctgcttttgaatatacttagcttactggcatcttttcaccttgcagaaatcccttctggaacaaggataaacaaaagaaccaagtgagcatttactgtctgctgagtcagtggatgtgctctgcctccctaccctggggaagcagtatgtgccgaaacccggccatgtggagaccaggttgtagacgtaggatatcatttattcagtcagtcatcagttcatttagcaaatattggatgcttactgcataccaggtactgtcataaggagacccaacagtgaacaaaacaaaaaactccctgccctttaggagctgatgctctagttgggggagagacaataagcaaagaagaaaataatgatctggccgttcacatggcccagtgggagattcagcagggggcaggggcgtgctcctggaggaggtcatggtttcagattgggtggccaggacagacatcagctgatgtggagtcttttatgaaaggcttgaaggaggggtcggggtggtggctcacgcctgtaatcccagcactttgggaggcccaggtgggcagatcacctgaggttaggagtttgagaccagcctgaccaacatggagaaaccccatctctactaaaaatacaaacattagctgggtgtggtggcacatgcctgtaatcccagctactcgggaggctgaggcaggagaatcgcttgaacccaggaggcggaggctgcagtgagccaagattgtgccactgcactccaacctgggtgacagaatgagactcgatgtcaaaaaaaaaaaaaagacttaaaggaagtgagggagtgaatcaggtggtatagggggaagggcagaaagagtggctgtgcagaggccttggggtgcgtttccagaacacagggaagccagcgtggctaggacagagagaccctggaggacaggggatgagaccagaggtcctgcaggcggattgaggggactttggcttggactctgatctgggagggattggggcatgatcttgtcagaggcgtttgaaccagagtgactccatcttgtataggggctgggtaaaataaggctgagacttgctgggctgcattcttagtaaattaggcattttaagtcacaggatgagaaaggaggtcagcacaagatacaggtcataaagaccttgctgataaaacagtttgcagaagaccgggcgcggtggctcatgcctgtaatcccagcaccttaggaggccgaagcaggcggatcacgaggtcaggagattgagaccatcctggctaacacggtgaaaccccgtctctactaaaaatacaaaaaaaaaaaattagcccggcgtggtggtgggcgcctgtagtcccagctacttaggaggctgagggaggagaatcgctggaacccgggaggcggagcttgcagtgagccaagatcgagccactgcacgccagcctgggcgacagagcgagactccgtctcaaaaacaaaacaaaacaggttgcagtaaagaagccagccaaaacccaccaaaaccaagatggcaatgtgagttacctctggtcgtcctcactgctcgttatgcactcattaggatatattagcatgctaaaagacactcccccaccagggccatgagggtttacagatgcaatggcaatgtctggaagttaccctgtgtggtctaaaaaggggtttagctctaggaattgctcacccctttcctggaaaactcatggataatccacccgttgtttaatataaaatcaaaaaactatccttagtccagcagctcaagctgctgctctgcctatggaatagcccttcttttattcctttactttcttttttttttctcgagacagagtcttgctctgtcgcccagcctggaatgcagtggcgtgatctcggctcactgcagcctttgcctcccgggttcaagcgattctcctgcttcagcctcctctgagtggctgggattacaggcacgtgccaccacgcccagctaatttttgtatttttttatgtctcttttcagtatattgcatgaaggagttacactagtccaagttaaaaaccggaccccaaatggttacattgtacaagctatgaggtttttaaacttgtgacaagggacggaagggaaattttactcattgcaggcaaatcctcacttaagcttcagtgagccacaagcacttaaaacccatgaaccttcagctgatcgtccttagccagtccagtctctatgaggaactggcatatgttcttgtgttggtcaccctatagctgaagtacttctccatattccggatgctcaattacagcaccattgcaggcaaacttcttttttattttttatttttgaggcagaatctagctctgtcgtccaggctggagtgcagtggcgcgatctcagcttactgcaacctctgcttcccgggttcaagcgattcccctgcctcagcctcccgagtggctgggattacaggtatccatcactacgcccagctaattttttgtgtttttagtagagacggggtttcaccatatttgccaggctggtctcgaacttctgacctcgtgatctgcccgcctcagcctcccaaagtgctgggattacaggcgtgggccaccgcgcctggcctttctgttgaattcttatatggatataatcctcagtgctagcaagaaacaggtcatcagccttacttgcatcagcaaaggggtctgaaaagaaaggttaaactgcgccgggcgcagtggctcacgcctgtaatcccagcactttgggaggccgaggcgggcggattgccagacctcaggagtttgcaaagctcagatgccactgccactgccatcccccctagatgttttgtgcgtgcagaaaataacactgaaatcatcagggcttgggccaggccgaatgtgtcctttgctggctctcctggagcaggtcagtccgggacagctggcttccccaggctcagggaatgcctgggccttccgccctgcctgggaagctgatcacgtctaatatttgtattcttagtagagatgggggtttcaccatgttggccaggctggtctcgaattcttgaccttgtgatccgcccgccttggcctcccaaagtgctgggattacaggtgtgagccactgcgcccggcctattcctttactttcttaataaacttgctttcactttactctgtggacttgccctgaattcattcttgggtgagatccaagaaccctctctttgggacccatttccagtaacaatcttagtgtttttggttttttttttttccctaattttagaaaacttcaaagatatatgtaaatatatacaataggaaaatgaagcccatgtacctgtatcgtggctgaggagtttggttttcttttcattaaaaaaaattaaatgtactgtttatggctgggcatggtgactcatgcctataatctcagcactttgggaggccgaagtgggccaatcacttgaggccaggaattcaagaccagcctggccaacatggcaaaaccctgtctctactaaaattacaaaaattagctgggtgtggtggcatgcacctgtggtcccagctaattgggaggctgaggtaggagaattgcctgaacccaggaggtggaggctgcagtgacctgagatggcgccactgcactccagcctgggtgacagagtgagactctgtctcaaaaagaaagaaagagaaaaatttaatgtactgtttatatgcagtaaaaattctttctttcagcatgctctgcaagttttgacaaacatatctagtcatttaaccatgaccactaccaagttataaaacagtttatcatcccagcactttgggagcccgaagtaggaagattgcttgagcccaggagtttgagaccagcctgggcaacctagtgagactccatctctatgaaaataaaaaatttagccaggcgtaatggcatgtgcctgtagccccagcaacttgggaggctgaagtgggaggattgcttgagctcaggaggtcgaggctacagtgagcagtgattgcaccacttaactgcagcctaggtgacagagtgagaccctgccttgaaaaaagaatgacgagttgatgggcgcagcaaaccaacatggcatatgtatacctatgtaacaaacctgcatgttgtgcacgtgtaccctagaagttaaagtataataaaacataaaaaaaaaaaaaaagaatgaccacctgggtgctgcacggatcagcagtctgtcccttcacagctgcatgggattccagggaatgatgtactggccttggttttgaagaccgctctgccctccatgtgggggatgaaccctggaggggaagggggagagcaggggacccctatcctctccctacacgcagtgacagcagtcgcgtagcctgtggccctgagttcctccctcttacagcagtgctgtgcagaagaaggtgctatgctcagttcagcctcactttacagagaggggaggtaacttccttgggttacacgctggcaagtggcaaagtcagattcaaacccagcccctccgtgttctgtctccaggagtgcgctgtctctacaaggctccccaggggctctatggacatttgtagattttctgatccccactgtggggccagggaaccgattacagggaggcagccaagcttgacctcagaatcctaacagccaactgcagcctgaggacccccgcatgtgcaggcagctcctgggcttggcccagatcctactgtctccttgcaggagagggaggagcaccaacaaaagtttagtgacagatcggtctaggatgagacgctgagtctgtcttcagagcctctagctctactccccatctgtgaaccagaggtaagaagtgtgaattacttcaacaagtatcaaagcgtcctggtgttggaggctgacacctgagcaggcctggttccatcctggccctgctgtgtggcctgaggccagtcacagtccttctctgggcctcatcttcccttcacagggctcctgcagccctgattctctgtgctgctgagctgcccgccccgggaatcttggctctgctgctggggcagaatagtgtgagcaaggcatgtgggacgcgtgctggtcaccagcccaagcttcttcctagtgagtctactcccttcccttgcccagaccccagtgccctgacacctgcagacagagcatttgctttttctttccatacctttattgtttttcttttctttctttctttttttttttttttgagacagagtcttgctcttgtcgcccaggttggagtacagtggcactgtctcggctcactgcaacctccgcctcccaggttcaagcgattctcctgcctcagcctcctgagtagctgtgatcacaggcacgtgccaccacacctggctaatgtttgtatttttagtagagatggagtttcaccatgttggccaggatggtttcaaactcctgacctcaagtgatccacctgcctcggcctcccaaagtgctgggattacaggcatgagccaccatgcctggcctgcctttactgtttttcttttctgattagaagcatgaggagtgctcgtttaaaattttcagaacacacagaaaaatatcaagaagataaaagtcataaatccaccactgttcagtttggccacatgccctcagacatcttcctgatcctgtaaccatccattcatgtactcatttactcattcattcactaattgactcatgcacttgctcactcacacggtgcttattgagcaattgaggtatgttctggattctgggaacacagcgtgaacagacagacaaagccctgcacacatggagctctttatgtgcaaatagaacgttttccaacaaggctgggtgcggtggctcatgcctgaaatcccagcactttgggaggccgaggtaggtggattgcttgagtccaggagttcaagactagcctgggcatcatggtgaaatctcatctctaccaaaaatacaaaaactagccaagcatggtggtgtgcaccagcttcttgggaggctgaggtgggaagatcgctttagcccgggaggcaggggttgcagtgagcccagatcgcaccactgtactccagcctgggggaacagagggagcccctatctcaaaaaaaaaaaaaaagttttccaacaaaattgtaatcaaatcagattatctgttttatagcttgttttttattttcaatttaacaatatgctgtgatcattttcctttgttaatatataggaaaccacagaattattctataagaatatttttaggctgagtgggctggctcacacctgtaatcccagcacttcctgctgtggcaggaggatcgcttgaggccaggagtttgagaccagcctgggaaacatctctacaaaaaaaaaaaaaaaaaaaaaaaaaaaaagaatattttatttatttatttatttatttatttatttattatttttttattttgagatggagtttcgctcttgttgcccaggctggagtgcaatggtgcaatctcagctcaccgcaacctccgcctcccaggttcaagcaattctcctacctcagcctcctgaatagatgggattacaggcatgcaccagcatgacgagctaattttgtatttttagtagagatggggtttctccatgttgaggctggtctcgaactcctgacctcaggtgatctgcccaccttggcctcccaaagtgctgggattacaggcgtgagccaccacgcccggccccaaaaagaatattttaaaagataattttgattaggtaatatattcatgtttcaaaaactaaaatgaagtgtatgtgggtaccaagaaaaaatctacccactgcctttgtctgccatctgccttctgcccagagctcctccacttcacacagggaagcatttttacttgtttctcatgaattcttccagtgttttccacacataaatacaagtgaatacaaatatatattcttcccccccacttttaacccacaagttggcatatcacttagcagtctctcctggagacccgtctgtctctccctatagcacagcggtccacggagtggagggacatggcactcacagctgaaagatcctaaccattctcctggatacagcagtcctttaccgatggctatctgggtaatttcaaaatacagcatctttgtctcagttgttgattctttcatctcagggatatgttcatgatctatccagttccctcttgttgggattttgataatttccagtgtttcactgcattgcgatggatgagtgtgttagtacttgtttccgcccacccacctgattgtcttctcaggaaaatgagacccgagggctcctcctaggccaggtgccatgctaagtgcttcctgggaattctttcatccagtcctcacacccaccctcggaagcaggagttgcactcatgaagggactgggctctgaggagcctgagaactttccaaaagtctccttggtggtagctcttggaatttggatctgaaccccagttggggtaagtctggagtctgatctcctgagcagagaacaagtggctacaaagtcaatgcattgtgaagccactggcactgatgggcagttgcctccccaggataaggtgcctcccccaccctgaagagacctgaggctcttaacgattctctggaattggctgagcacggtggctcatgcctgtaatcccagcactttggaggccgaggtgggcggatcacctgaggtcaggagttcgagaccagcctggccaacatggtgaaaccgcgtctctactaaaaaatacaaaattagccgggcgtggtggtgggcacctgtaattccagctgctagggaggctgaggcaggagaatcgcttgaacccaggaggtggaggatgcagtgagccgagatgcgccattgcactccagcctgggccaaaagaacagaactccatctcaaaaaaaaaaaaaaaaaagattatgtggaattaattgagggtaaaaaattccatggtgcaggacccaggcaggttacaggattgcaagaaatggctgggtgtcagacagagggagcagtgtggagtgtggcaaagtgggaccacctggtctgtcccaggggcagcttctgctccttccagcaagttgttccacaagggagccctgggctaagtcttctgcttttcaacaggagctggaaatcgaataaaaatgtgagacttcttgatgtttaaatggcagttaattttggctgagtgtgatggctcatgcctataatcccagcactttgggggggcaaggtgggcggataacttgagctcaggagtttgagaccagcctgggcaacatagtgagaccccgcctctacaaaaaatacaaaaattagctgggatgggaagccaaggtaagaagatcatttgagtttgggtggttgaggatgcagtgagcagattaagtctttgcactccagcctgggcaacagagtgagacgctgtttcaaaaataaataggctgggcgaggtggctcacacctgtaatcccagcactttgggaacccgaggcagaggggatcacttgaggccaggagtttgagaccaacctggccaaaccatggcaaaaccccgtctcttctaaaagtacaaaaaatagctgggcatgatggcatatgcctgtagtcccagctattcagggggctgaggcacaagaatcacttaaacccgggaggcgtaggttgcagtaagcagagatggcaccactccaatccagcctgggtgacagagcaagactctgtcttaaaaaataaataaataaataataagtaaacaaacaaataaataaatgccaactgattttaaaacacaggtaggtgtgtctgctgctaacttagatggtcgggagagtgagagagagagagaggcagagagacagggagggagaggggtactctggcaaatgggaaacccttgctaggtccaggcaaaggccatgtacagattcacccacgattctggctgtttgtttggaggtgttaattttttcaaaataagaaaattgctcaggctgggtgcggtggcttatgcctgtaatcccagcactttgggaggctgaggcgggtggatcacaaggtcaggagttcgagaccggcttggccaatatggtgaaacttcatctctactaaaaatgcaaaaattagttgggcatggtggcaggcgcctgtagtccctgctacttgggaggctgaggcaggagaatcacttgaacccgggaggggaaggttgcagtgagccaagatcgctccactgcgctccagtctgggcgacagagcaagactctctctgaagggaaaaaaaaaaaaaaaagagcaaattgctcactctgaaagagataaaactaaatgtaacatctgaatcttggctagctcttagtttgaaacaaaaagtccagccataaaagacattttggggacaactgggtaacttgaatgtggactgtgtgttagatatctgtggaattacagtgttttttgcagtgaggtaagcgtatcatggtcttgtagaacggccgccttctcagggagtgcatgctgatggactaggggcaaaaggtcacaaagtcaaaaacttactttcttttttttgtttaaatgatttttagataaagatcgaggagtcagaggaggccttgctatgttgcccaggctggtttcgaacttctggcctcaagtgatcctcctgccttggcctcctaaagcattgggattacatacgtgaaccactgcttctggccagtaacttactttcaaatgattcagggccaggtgtggtacctcacacctgtaatcccagcactttgggaggctgaggcgggccgatcacgaggtcaggagattgagaccatcctggctaacacagtgaaatcccgtctctactaaaaatacaaaaaattagctgggcatggtggcggacgcctgtagtcccagctactggggagactgaggcaggagaatagcgtgaacttgggaggcggcgcttgcagtgagccgagatcatgccactgcactccagcctgggcgacagagcgagaccccatctcaaaaaaaaaaagaaaaaaaaagattccgaaaacagcacatagctatgtgtagagaggggagtgtgcacgtgggcagagctgtcagcaccgggcaggtcgcaccagatggcagctgtggattctgcttttgacttcctgtgtgcttaaattttacataataaaaattcagaggaaaggggggaaaaagtgaccacaggggtgaaacaaaacatatgggtgctagaaatggcccctggtttgtgacatgtcattcagcccaatcctccctcaatgcaagatgggaaaactgaggcccagaggtggagggagggtctcttctcagagcggacttccctccctaattctgttttcctcacaccgcatgcaagcagctgtttgggcaggagaggctgaggtgacacttcctgtccctttgtcttttctcttcctgccagagctctgtgagggtggttctgttacagcccatttcacagaggtggaagctgagggcctgagagcagaagttacttgcctgagtcacacattgagttggggtgggaaactggtccctaggcccccaccttcctccgatccctagatcaagggcaatggctttggatcagcaggcccggcctggcccccagttttgctgtgtgaccttgggtgattcatctgacctctctgtgctgctccaggggtgaggagttaatgaggtgacccatgagaaggctcctgccctgctgccctgcacacgatcaattctgtcacatattcctctgtccctgcagtccctggaatctcagaatctccagcaattgccatggcccccgccctgccttgctgctatttccctccagcctctgtataggtttctgcgtgtctcttcctgtcagggtttgccactagccaggctttggccctgagggatggcataaactagtggaatttcaggcagcaagaggcagagcgactggggagatatatgggacattctcaccccttgtctggaatgtcctttttcctacactccaattggcaaactcctattcatcttctgaagcccaggttaaatatcgtcactctgaggagctttcccccatcctcagcccaggttgggtcagtcaccacccagtggctcccgcagtccctctgagtgccaccattatgtgggtgtgggttttcttgctccatcgcctgagagggcctgggttttgctcatccccctacccattttaaagaatgggaaactgagaccagcctgtaatcatacagcaaatgcagggcagagtcctgagggcgagagtgcaggcaaatcccggtctcaccacagactctctctctccttgaccttgggcccatcatgtcaccccctgagccttagttttcttgtgtgtaacatggcagtaatggccccaaatgctcaccgttttttcccttcattgaaaggacttctctgctcctccctcagctttaatgaaggataattacatacaataaaatgcagccatttaagcgcatggtttgatgatgtttgacacatgtatacggttgtgtaaccaccactacaatcatcatacacaacatttccttcactcccaagtttccttcgggcccctttgcagttgatcccctccccaccccagtcccttgccactactgatggctctgtgccactgtggttttgctttttccagaacgtcctgtgaatggaatcgtattgtaggtagccttttgaatctggctttttttttccggcggaatgcatctgagctccatctgcactgtggcatgttttgggagtgcattcctttcctgtcaccgagtagtattgcattgatggatatataccatgttttgtttatccctttccaagttcatagacagctgagttcttgctaggttttatctattatggaaaaagctgttactaacctttgtgttcaggtttgtgtgtgtgtgtaaacacagttatttctcttggaagtgaaatagctgagtcctaagtaggtgtatttaactttataagaaactgccaaactgttttccaaagtgatcctaccatttcacattcccacagcaatgtatgagagttccagtttctgcacatcctcaccaatacttgcaattatctttttttttttgagacagagtctcactctgtcacccaggctggagtgcaatggcgcgatctcggctcactgcaacctctgcctcctgggttcaagcgattctcctgcctcagcctgctgagtagctgggattacaggtgcgcacccccacgcccggctaatttttgcgtttttagtagagacggggtttcaccatgttggtcaggctggtctcgaactcctgatctcgtgatccacccaaagtgctgggattacaggcgtgagccaccgtgcccggcctggaattatctttttttaaatttttttaaattctttgtttatttatttttgagagagggtcttgctctgtcactcaggctggagggtagtggcatgattatggctcactgcagccttgaaatcccaggctcaagtgatcctcctgcctcagcctcccgaacagctgggaccacatgttggtgccatcacacccagctaatttttttttttttgagacgaaatcttgctctgtcgcccaggctggagtacaacggcgcgatcttggctcactgcaacctccgcctcccgggttcaagcgattcttctgcctcagcctccgagtagctgggattacaggcgcctgccgccatgccctgctaatttttgtatttttagtagagacggggtttcactatgttggccaggctagtctcaaactcctgacctcaggtgatccgcccgcctcggcctcccaaagtgctgggattacaggcattagccaccgcgcccggcctttacactcagcgaattttttattttttgtagagattgggtcttgctatgttgcccaggctgtgtcagtcattttaattttcacctttctaataggtgtgtagtggtttcattgtggttttaactgcatccctctgatgactcccagggttgagtcactttccaaataagcacatggaaagagactccccatccatatgtcttccttggggaggtgtctgttcagatctttagcacgtttttcagtcattttaattttcacctttgtaataggtgtgtagttatttcattttggttttaactgcactctgctgatgactcccaggttgagtctctttccatgtgcttatttgccatccacatgtctttcctggggaggtgtctgttcagatcttcagcacgtttatgtttatcttttttctttttctttttcttttctttttttttttttgagatggagtttcactctgtcacccaggctggagtgcagtggcgtgatctccactcactgcaacctccgcctcctgggttcaagcgattctcctgcctcagcctcctgagtagctgagactacaggtgtgcgccaccatgcctggctaatttttgtatttttagtagagacagggtttcaccatgttggccaggctggtcttgaactcctgacctcatgatccacctgcctcagcctcccaaagtgctgggagtgagccactgcgcccggccatagcacatttttcattgtgttcttctcttactattgagttgtaggagttgtttgcatgctctgggtgcaagcctctgagaagtattctgccaagatcttctctcagggttgtttggagcattaaatgacatcatcaacacccaatagtgggtgctcttatcattattatgattactactattatttatcacttcattttgtcattgtggatacgatgatgtgtctcccagcccagaactgccaggagcacctgctcacggagcttctttggtgccccatacctaccagttgggtcccctccagcaggaccccccgcaggagccccagcttccaccagagcactgggatgccctttgtgtgttgtttggtgtttataatactcatttatcaaaaccagccagctggcttaggctgcttggccgcactgctcatgggaggggaggcgtgggaggtggcctccccctcctggacctgtcggagagacaacatcatagccctccccatcacctggcctgcacccacagcccagtgtgctgggtgcctgcagacatctcccattcattagagccacaccatagcacccgggtctaggttctgattcccatttgccagatgagacaacagaggctcaaagaggccatctggttgcggttgctgagagtcccacggcccagaaggttcgcattgagatacgattgcagggtctctggctctcatgtcatcacttgctcacattctcactcagcaaaccctcatccacctctcctgctgcctgcccaagcgggagagcagccagaggcaagcagggactgttgagcacccagcaggtatgaagcacgagactgcataaatgatctcactccagggaggtggctgttattgtgttattgtccccttttacagaccaggaaactgaggcttaaagagacctagtgactcactcaataaattagtggcagagcaggatttgaacctgggcacactatttcctcagcctgagtgcctgactgctgggccaaactgaatccatggtctgtgtcccttcagtgggatgggccccaatctggcccgtagttctgggagcacacatgctgtgtgtgtgccctcaccaatcatcacaaaggtcctccaggaggccctgccattcccactcacccttgaaatcctgtttccttctccattcaagctcatgtggctccatctctgaaccttgttccgtgcagggctgcttcctgcaccagcttccccacccaagcagttagtaagaaccagaactccatccggaggctcacagcagcccctgagggagattggccaagggagactggccaaggcggccgggagcttccaactgagggaggccccgaggcctgcaggtgcctttctcttgctctgaatgacactaggaatccaaagatacatctggcctgggcctgcaggcttgaggtcagtacagggtttgcaggaacccagaggagccagtggtagttccacctgaagcatcggggaaggctgccctggagaggtggtgctggcatgtggcctagaaagatgacgtggtcatcagcctatcaactccacatttctccatcaagctctatctcctcttcccacacccactgccccgcctggttttatctgtgtgattggcaggctccccaaccctaatctggaggaggctccaagcctctccatcaccctggcctcctccctcagcctccttctactgcctacctgccaccacagcctcagaatctttctcaggtcccgtcccctccccactggaggaggaagcctccgccaggggccctgctctaggaaacgtgctgacagactgggaagtgtggcaggtggccccgtgaatagtcacggttcacattaaattccaggagtgtggaggttttagagaatggctgcaaattctctgtcattccttcattgagaggcggggtctgtgtctcctcccttatatctaaatgggctacttcaacccacagagtgaggcagaagtgatgctgggaggctgtctaagctacatcaggccatgcagcttcatctggttctcttgggacactcatgctccgtgcctgttgccatgctatgaggaagtcataggcagaggctggatggaagtgctccagtccaatcaggcagggccagagtcctcctggcccgggtgaggaggaggtaaatatgcaggtgaaggaaactgcacatgaatccagccgaggctgggacgttacagcacagggacaggccatccctactgtgccagctatttcatacccctgagtttagggtggtttgtgacacagcaggagataaacaaagaggggattttgtgacttcccccaaccctggtcatcattcctttctcaacacatatctgctggaacccatgaggggacaggggctgtgcaggcagctcaaagtcaaatcctagatccactgtattctctgtccctgtaaaacagtgggggcaggattagaatcagggcacatttgataggaccccctgcactacccccaagccactgcacccaccctagcccctgacaatatttgagtctggggtctcaggtcactagatggtgacatgttcctcctggctctggcttcccatgaggacctcaatttgggtaatcctggaaggctgcatggaagagacaggatttgagctgtaacgaacaggcagagttgaaataattgtgacattttgtttatttatattaaaatattatattaacaattatattgattgccttaacattaaaatactatacatttaatatatcctgaaaataatacacactttttgcagaaatgtttgacagaaagggtgtaaagaaaaaacaaaaacaaaaccatctttgtaatttcagtgtccagaaataatcatggccgatgtgttggtgtatttcctacatttctaccatccaactcagaacaggctgcagccttcagcaaactttcccagctcaaacagggcagagaccagctggcagaagggagagatcccatcaccagcagaaatgcccatgtttgggccatgtggcctccaaggagggtgccaattcagtgccctccattcccagacaggactactcaggatccccagtccaaggctgctccttctctgccctgcaccgactgccgcaggggttctcacagcctttcctcctgcctcaagccattcacatcacttgggcaaggtggactctgcaacctccgcctctcggattcaagcgtttctcctgcctcagcctcccgagtagctgggagtacagacacacgccaccacgcccggctaatttttttgtatttttagtagagactaaaaaaaccatgggttttgccatgttggccaggctggtctcaaacttctgacctcaggtgatccgcctgcctcagcctcccaaagtcctgggattacaggtgtgagccaccatgccccgccgacttgctctgttgtagaggggcagccttgaagacggtgcatccttcttgctgcagactattcttggctctcaagtccccatgcacaaaaaataacctgcagactcaggactgtgtaaatctatcctcaggagggcaaagaaagccacttctctaagcacgccgggggcatactggctgcccgcccaacagatgtctggatcagtctgaatcctgggcacccgggagaggaaatgaattcccttcatcagcggcctcgagcccccagcagtcctcctccacccggggacaaattcttctctccccccaagaatgtttgcaatccttcggatggcagttttccaagaccgaccacttgaatgtcctctctaccctcataaaagcaagacctgttccttgctgggaaagcatggggtgggtgatcgtcttcaacctttaaagggctggacccgtagctgctgcacccgggggcacagctgacgggagaggagaagcggcctcttctcagcatggggatgtggggagccgctcagggagagaaaacgaggcctttacagcaccggtttaacagcctcggccacgcatctgcccgcacagatctaaggcttggcttcgggtccggctccacgcctgccccatgtccccacggtccgcggccctcgggaggcccggccctgggggctgagctctgccctgggaccgaaggccactctcccagccaaggccggagggctctgccctgggcacatgcgccccatccgcctgccctgagctgaccccgccgctccacaccaccccactcgcggctgaaaagctgaaggcagccgcacactcgcccttgcagcttgccctgcagcccgcgcggccatgtgagcaagcgcagccaatcagaggctcgccctggactccgtcccgggctggggggcgtggctggagggcgtggccgggcggtacccgcggcgtctctgcgctgccgcctttgcttgcgcggctgtgtagggggttgtggcgggccggagagtccccgagtgacttaacattctctaaaaataccccatttttgaacttcgacgacctgggttggcctgctcactctgtgtccctgcgctcctctgcttctctgctccttcggtcttgtgtgctggggacacgtgggcctttccagttccctgcagccacctttggtctgtaggaaggcagtggcgcagggagcggtgggagcccgggtctgcagggctcaaggtggcgacggcgaagcggtctgccccacccgccacccccacccgcaggatgcgcatcgccagtgcagcccgggtcgtggccccccaacagacccagtcccgccgcgacacggcagcagcacctcttcgccgcgacacggcagcagcacctcttcggccctttgagctcttccctccttatttctcagtctcatgctacactgcgattcttttatttatttgctattttaggcagtatccgccggctctctaccatggacactcagtgaggatttggttctcttaggtatgaaccctgtgcttcacctcctgtgagctccaagactcatttcatcagttttgggatgcatcagtatttggtgtttacagtattatggttatgtaaatattgttcccagctgagctgtgcagtacattgtgacaacattttccattttgtgttgtttgttttcctgggaattcataatagcctgttttcttcttgcatcaagctggacactcagtggatcctttcaaatctggagacatgaccttcggttctgggaagctggaaggcacaagtgctgtttttacaagctctgaactcatcttgtttctgtccccacctgcccccccacttccagagggaccttgtgactcccaggctatgtatctggggggcctctggccttgaatggttccctcgacatgcagaatttggttgcagcttcctccactctgcctaggtgattactattaattttccagcttcgaaaattctgtaggctggatgcggtggctcgcttctgtaatcccagcactttgggaggctgaatcaggaagatcgcttgagtccaggaattcaagaccagcctgggcaacgtggcaagaccctgtctctacagaagaatttaaaattagtggggtgtggtggcgcacgcctgtgggcccagctactctggagcttgaagcgggaggatcacttgagtccaggaggttgaggctgcagtgagcaaagattacgccactgcaatccagcctgggtgccagagagagaccctgtctccaaaggaaaagttctgtagactttttgtccttgccattgactttctttgtcattgactttctttataagtttgcgacttaaacatttttccttatattgtcatcttagtggggtttggagagggaaaagagaaaaatatccctgttagttccatgttagctagaagtccctctcactctgagcatctactatgtgccacagcctattttaagccagcccttatccccagtttcacatggctctttcttgtcacccaggcctgagcagagaagacacctcctccaggaaggtctccctgactacccagtgcttctctgctacatcactcagctctactttggttcatagcccttacggcttttcgaaattattttatagatttatgttcatccatgctgaatttgccttatttctcaagctcctctagaaggcttgccccataaaggcaggaggtcttcactgccccatgaaggcagggacctttctgtcttggttttcactgtatcctcagtgcctcccataatgtcaggcaaaaccagatgctcaggaagcatatggaacgaatggatgggtttgagcgtgacacaacttcaggattgcttaagaaaatgctgatagtggtagccaggcgcggtggctcacgcctataatcccagcactttgggaggccaaggtgggcagctcacgaggtcaggagttcgagaccagcctgaccaacatggtgaaaccgtgtctctactaaaaacacaaaaattagccgggtgtggtggtgtgcgcctgtaatcccagctactcaggaggctgaggcaggaggatcgcttaaacccaggaggcggaggttgcagtgagctgagattgcgccactgcactccagcctaggtgacagagtgagactccgtctcaaaaaaaaaaaaaaaaaaaaaaaaaaagctgataatggtccaagcttactgggaacgaaagaccctgccatgaaagggtgagacactcatcgtgggagggacataagcccaggcttggatggccgaaaagggacagaagcattgatgggaacggacagggtgacctccaaggcctggctgagacaactcattggttcacggttacttggctacttcctggcctagattagaaaacagcactttgaaggcagatatgctggatgcacccgtgttgtggagtcagccccattgggacgcttttgcctctcttctccctggttgtgtgatctcacgggcaagttgcttcatctctgtgtctgcagtacttctcacccatcatggggcaataagaacagccctgtggtcttggcatctagataatgaagcacaggattgaactaaaaaggctgacacacagtaggctgttacagtgatggtctgggttaaaaatctggtgtcatccttcctggtggtggaacctgggcaagcgcttgaagccttgggcttctgtttcttcatctgtaagatgaaagtctaaccacacccacttccctgggatgtgtgtcaagtcacgaggcctggcatgcaacaggtgccagtaagtgttgtccccttgactgcctcctgcctgctgggcaggaagtgctaagtttgagaaccctgggcagggagacaccatgctgaggctccttggacccctggactggtgttggggacagccacagggttgttcgtgcaaccctgcagggaaccgggcaggccagactcaactgctctgttagaagcagagctggtggctttccagaaagcagtgaagggagctcaaggggagtttgttttgctcggaagcagggtgttgcaaaacactttagtggaagtgtgggcaggaaaaggcagggaaaactatctccatctgacagaacagatttcaaacaatagctctgccattaccagcggtattggatgcttctgggcacctctctgagcctcgattttctcatctctttagtggagatgatgataatactagacacctcgttgggacattgaaaactttcctccactccgcaagtattcactgagcacctactgtgtgccggagacactgcagtgaccaaagcaaaggcattgcccccgtgcagcttgcatcacagtgagtccataagatgctgtgcttggagggactagcacatagtaggagctgtaaaaataggacttgctgttttgctagtggagccagtcacttgtgtgaattcatcttttgatatttgagagtgatgatgatttaaagaaagcaggtgagcctccgttgaggtttccttctctatatttcgacttcagaaccggcccctgagtaaaagatgctcaggaaccacatattgctgcctccaagcttctcaagttttcacttttccaccatcaccagcatggcctgatgctgttctggggagaaccagtcacaggccctgctttcaagcagcaggagtcgtatgggagaggcagacaggggcgcagccactgacagggcgggtgagccatggtgagaggggctggggcaggggcactgggcagagcagtgtcaggcagggcctcctgtcccaccttcagaattgggcctcgaaggagcggagggaatgtgtcaggtcggaaggtagggaagggcattcctggctaagggaacagcctttgcaaagaaaggttcaaagaggaaagcttgaattcagagtggctggactgggggatgtctggagaagtcaccaggggttggagtgttggaagttgcccgcctagggagccagggcaggacttagaacttggccagccgtgtttgggaaggctctggctgcagtgtggaaggcctgggggcaggcagcacagagaagaggaggctggatggccgtcaaagcagtgagggcagtggatcctgtgctcctgggcactctagagcactgccgggccctggtcaccagagggcgctgtggggcagcaagcagtggaggccccagctggtggcaaggctatgcatagaccatgtgcaccgctgtgcctgtgggttgtgtctgtggacgtgaccatgtggtccctccacatgaacgtacacacttgtgcacccccttgtgtcatgtgtgtgtgcatgtgtatttggggtgtgtggacttgcacaggtgtgaaggggcacgtgggagtgagtacgtccaagggggtgtatataggtgagaacagggactcctcagctcccaccacccagccacatcggtctccttgttactcgcctacaagccatccacctcagggcccttgcacaactgttccctctgcctggaatgcttttcccccggatctctttgtgggtccttccgttaagtcctttggtctctgtttatgtggcaccttccagggaggcttttcctgacctccctccttaaaattatagcccccatgtccagacacacaccctgtcccctcccctactttcccccatagcatttgtaataattttttgttttttgagacagggtcttgttgcccgccaggctggagtgcagtggtataaccttggctcactgcagccttgacctcctgggttcaagtgatcctcccacctcagcctcctgagcagcatgccaccatacccagccaacttttttttttttttttttttgtagagacgaggttttgccatgttgcccaggctggtctcaaactgctgggctcaaacgatccacctgcctcggcctcccaaactgctgggactataagtgtgagccaccatgcctggcctgacataatttgacttaggcattttgcttgtctggctcacacaccaggtcatacctccccagggagttgtgtccatcttgttcaatgttgtgttctcagtgccagtcacacagtaagtgctcaatgaatatctgttgaatgaatgaaggagctgcccacatcctgggtttgggtcagcctctctcttttttttcccccatcatcagtatttattgagcatttacagtgtactaggcacaatagaacatacagaaaacatttccctgcccttgaggagcttacattttaaaagaaaaaatacacctcttttaaaatggcatttttgtttggtgttttctgcaaagtaccgaggaaatattttgtaaagtgatgctttgggtataacttagccccatcattatttaaagaatagaggaagaagaaagaggaaggattttaaaggcagacaatgacagaccattcaggataggtagggttttaaagggagataaacacaatctcatcgactaaggagagatttgctgtagtaaataggatgagggaaatagtctgtgggatgcaagcaaaggaagcagggtgccttagacattgattggagccagaaagatcatgcggcctttttccaagtacatggccaccaagtaggaatggttggtgacaagacagaaggctaaaaaaggaaggtaatcttgtgcacctgacaaatagaaagaataaaggatcaaaatcgaaggcaggctacaatagtatcaagaaattcttaaaaaccaaaaagtgatttggaagcacaaaacttatagttaatgctattgagtcagcctctctttacagccttctgtcaccccaggtcctgcccacctcagatcatgcttgcatcctgactttggccacaatccttcccatccagagactcagtttcctgcatccacagagagcaggtttgggacttttctcctaggaatcaaggtaagaggcagcctcttgtgacccatgtcaaacatttattctgctttctgcatggtcatggagttccccaatctgactgtgccacttacagacagaaagaaatcaagagatgtcactatagcaagccagcaagagacctttgtctctgatggttcttgatggtacttcttgagctccagtggtgcagctgtgcatcccagtctggccctcacctggtcctcatgtgtggccctttttacatctccaacccattgcctctgctgttcctttccagggatgctcttcttgcttctctgcctggtaagctcctactggtccttaaaagtccagtctcaaaatcacctcctctgagaggccttccttgtccccacccagatggagatggctgcatcacccaggcaccctcctgggacttttgctcatgcatctatttatagcactcacatggagttttgtgattcctgagctgtttatcgggctcctgactaatccccaaactccttgtatgcgagggcctgtctgagtcatctggccgccaaggaggttggcacgggactggagtcgcttcaccctggtctgtggatgctttcctccttccttttttcattcctcaaatatttatcaggcacctactatgtgcctggttctgggctatgcattgggaacacagcagggaatgaggctcggatggtctggagggagagctgtgttaaaaactgagtcagtaacaaagacatcagcagcataagtgttgtgcctcagtctggggaccatgatgagaaggcctcttaggggtgttcatttaggaagcggtctgagggatgagagggaaccagccccaggaggcttgagtggaagaatgttctgggcaggagcagcaagggtgaagctgctgcggcaggaccatccctggcacatttgaggggcaatactgagactcttgaacatcccaagaagcagagtgcacaaggcggagtgtggccttgtgcagaagtcaaggctgttggccagtgcctgaacccagaaaactcgctggactagccttgcagttctggtagaaaggaagctgctcctggatgcccattttacagacggataagcacaggtcaccagggatgatatggcaaggatggaggcagcccacagtgttttcaaactcacatttcctgggcacctagtgagtgccaagccctaggccaggtgtttccactcctgaactcatgaaacgctttcagagaccttattgtccccatgggataggtaaactgaggcacagagctgctcagtgacttctttaaggtcatccagctagtaagtggaggaattggtattggaacccatacctatctgagccccagactcatgattttccatcccactgcctgggaagggtgaacaggagacgcaggaagagaatggtgatggctgcaaggcttccctcttatctcctgtggctccccactctgtgcatggggccctgcatcacccccactttacacctgggcaagcagaggtcaggcccggcctcaagcctttctagcaggtggtggaatctgcttccctcacgtgaggtccctgacagggtacacatgtctgcctggaggccaggggctgaccccttgacctttgcctggtacattctgccttcactagccctggctttacatccagagtcatctgttcccagcgccagattggtcagcggttcctgaaatcccccgaggttccgtgtgggagcagagggaggactggcccatccagccattatgcagatgggcagactgagatcctaggaggagaggagagaacgaaggtccaggagagagccaggatggggcctcggggctcgcgggataaaatgcaccgcatgccgcctcactccctctgagacacggtttccccctgtgtagaacaggggcagcagtaaccagccacgaaaactcctcgtgctgcctcgtcaccgggcatcgctgagctcaccaccgaccccgcgccctggccgggcgcctggagcgcgggcgcgggcgacgtttgctggcgccaggccctcagtgcgtgttagcgagcagcgccgggagatagctgtcaccgccgcccgctcacagatgcgtagactgaggctcaggtgtcaccacctgaccaaggctagttccgctacaaagctgccgactcggatccgaacccgggtccaatttacagaaaaggaaactgaggcccagagacactagggagcttgctagggtgaggcagctgcaggttcagagagccaggaggcagcccagcagcgcacttttaacccccgcccacttcggcaggcccagccgtgccacctttagggatctcgggttttttccagacgacgcacccaggagaacgcgcccgcgcatcgcacccgccggggctgcgggtctgggggtgccgggctgggcctgggcgcctgcagggagcagcgggctcagtgggtcccgggagtgggtggggcttgcatgttgacgggcagcgcgaggggcgcggctttagtccagggggcggagcctgaccggacctgggtttttcgggcggctggcggacttgacagagagcgggaggggcccggatcctgggcctaaggagggtggggcgtgtgcttgacaggcagggacaggccggcgtctgataggcagaggacgggccttggaaacgaaaggaccaatcgggcacgcaggggcggggcctgagtcagcgcagttcggccggggtctccccggcgctgcccagtctgtctccggcgccgcccgtcgcggactcgtccttgctgcagtcgccgccgcagtcctcgccgcagtcgccgccgccgccgccgccgccgccgctgctcctccgcctggcctgggccgtctgcccgcagccatgagcgtgctcggccccggtggagcccgcagtcctctagattagtctccaccgccgtccaggacccacttgcagcatggagtcgcccgcctcgagccagcccgccagcatgccccagtccaaaggtaggcgctcccggccgggacctcggcctgaccccgcgcctaatctggggccgggctgcaaaccccgacctttctttggtcccaccccatcctgttctcgacctggcagcggcgtccggtcccggaaccccttcctgttcggggtcccgggaccagcccccgcctgggccctcacctggacccccacgttaggccttgggactgcactcaggcccgagatcacccaggctggacccagactaggactttgttctgctcaccccatccaagtcaggagcctcattctgacctcatttgggccttatggctgcagcctggacatgaactctcccagtcttctccctcagcgggacccaggtgagattcacactggccttcacctgggtccttgggcagcacccagtcccatttctagcttcgggtcccagggctgtatccaggttgggatttaacttgagtctccatctgggccccagagtgctcctgttgttgcggacctcactgtaccccctatgcgggtgctctggctacaccccagctcggaactccccgtccttctctcccccagctcttcttatccttataggccctatgttgccccttccctggctggcctgcaccctgtcctgcagccctgggctcccaggaaccttccttgtcctcccacccctccctaaggtacagccccctctctaccggcctctctctgtcttgagttgcaagcttctccctgcactgggggttctcaccccatcttattcttgtcctggctgcctgggatctgggccagccgccaggccagggtgctggctgtgcaagggatttgctcttctccaagtagctggccttcctggaaatttttgtgaggtggcagcagcaggatttgtcatgcggagggggaaggatgaaactcggagggcaaaaggggaattttttttttttcaggaagaggaaaggatgtttttggtgcgtcggagtttcagtaggctgggttgtgcgagagatttccaaaccggacatagccgtaatgaatgggctgcctcctggctttctgaacctgcagctgcttcaccccagcaagctccctggtgtctctgggcctcagtttccttttctgtaaattggaagtaatcgcacctgcttctgtggacgtgggagtgtggtgtggggtggtgaatagtaaagagctctgaggcgttctctcagcgtagcacctggcgcagagccggtgctcaccagggtacactggctgcacacatctcgctattgtttccattcttcttgctggaaaggcctccactgctggaagtgcagcctcagagtgagcaggaggaagcacctagcagcgggcacctagtgggcacttcatcaggggtcagccgctcttctgttctggagggtgcaggccaatgggagccctatgtgggcctggggagggcatgggctcttcctggcccctgctgctggctgctatggtggctggagccgggtgggctggataattatgccttacataagtgggaggccggatccctgaccattgcccaaccactgtgagtaactcgggaggcactcgacgggggaggtgtctggggagggacttgcactgcacagacctcgtggagcttgggaaccaggaaatcagacacttctccactctggagagctcggggaagggtaggaagcactgtttgttttggaggctttttagctctccaggcagagaatgcctcatcaaaataaaagttccagttgcagagttgtgaaaggagaggggtcatagatgcagtgagaatgctgtgagagggccaaaatgaacttctagatgtggacccaggtcctagatgaggttgagggggctggatggagggtcagggacctccctcaggcccagggactctgtagtctctttggggtctggggaaggatgtggtggcagagccacaatgcccttcaccaaaaaccctatgagctccttctttttttccatgtgccatgcattttctcatttattcctcatagccccatttactgataaggaaactgaggcgttaagtgccttgcctgaggccacacagctgtgacaggcggagctagggttccccctaggactgtgtttccacagtggccttccccgtgctcccctatgtgcccctcccatgctggatgcctgagctgagctggtggggtgcccccacccctggccttgctcagagcatgtgcagtgggcctgtcctcatggccacgtcagacctagaggacagactgaggcagaggtgatgcctctcctgtgcacagcgctttacactgggcctgttgcattctcgctgcaaaatcccactcatttgacagatgcagaactcagcttggatggaggagtggccggactgcccccataggtggagagcctcactctgtgcccaccccatcctgggcactgggcctcccagcactgatcccttctccaccttctcaaaggaatttgaacaaagcagggagtggctggcgcttgaccttactggagctttacctttgagcttcctgcctggcagcaggtgccctgcactgtttccatgccatgggcctggggagttttctatgagtgtgtgaggccctcaggcccacagctctgctggttttcccctggcctccttgcccacatggccatctctggctggggttagaggccaagtggctggcgctggggccagtgggtgggggcatgtgtgcaagccacatttgtccttggagggtaccacacgtgtcctgttgtcgttcagaacatgggttctgccccttctgccctaagagtgccacctgtgggagcacttcatggctaatcttcacacagcttggactgtggctgtaggactcctgactgcccgatggtgacactgaggtttcatagagcactgttgtatcctagccctgcctgctgtggccacccccccaacccctggctgtcggaaagactggaggtggcacctcggggacttcccccacccctcttgtgacgcacaggaaactctctgtcagccaacccatggcccagcgcccaaagggagcaaagttctcagttggcccgtgtgaggagaaggccggggcagcggaggcttccggcggtgagtcagcgggcactgggtgctgactcacccgctgggcatgccagccggctgcctacagcttaaaggggcgatgcctgccagcctggtgggtggggagggggttacgtgtcctgcaggtggcacctagccctgagctggggcactggaggtggccccttcctgggcctcggactgggctgggaacccctgggcaggccctctgtgccccacccaggaacttcctctattaggcaaggggctctgcttcctcttgctcacagagcaggagcaggtggcagtgactgtttaccacccttggcccaggggacacctcaggttcagctgtgcagctgggactcagggagggtgaggagcagaggtggtgcagggtcggctggggtgggacccggcctgagctcctggaagatggtgatgtggagaggctaagacctcagtttccagagcctgactgcctgggtccaaaccccagctctgtcccttttgcgatgtgacgtgggacaagttgcatctggtccactctctgcactctgtaaatgatttctgtcccctgggcatggcccagctctcagaggagaagcttccatttcctcatctgcagactgagaatggggaccctgcttgtctggatgtagacagttccattccacacttgctaagtgtcaggcacaagtcatagtgagactgccctctgcctgcagagaacccagccgaggcatgcctctgtcaggcaggaagccgggggtcctgggctctgctgggatggccctgggttcgaatcctggctccactacttccttacctgggcaagtcttgtgccctctttagccctcagtctcctcttctgtaaagtgggagtaaacatgctcccttgcagggtagtggtcgagattgaagatagcatttgttaagtgaatggcacctgttattattttattattgttacttttgtgggtgtagttcattggtaggtggataaacagtagcagggcttcgtgacaatgtgctcgtaggcgctgtgacatgaggcctcttggctgtagggtcctttcacgcaggccagaatttaccaggctttagggcctcttaacccactggtccccaacgtggggctggggactgcccctggcctcctgggcctcccttgggagggtgagtggggaacagagagctggggcctgctcctgcaggcctgccctgcccctggctttggcatgcagcattaacaggacgaatatggggaaggtggggtgggactgggaattagaactcaggcccctgggccagcccgggaagcaagagggcctggggtcatggttctaggggctcagtcctgagtcaggggtgttggggggtggtgggccaagctgaggggagcaactgggtgccagtgtcttgggagggtcccagaggagggctgctgggcagcagcatggaggacacagcattgtggcagggccccacgactgatgcccacatgccgtccacgcctgcccttgtccgcgcctcctggcgctgcccacctccatcaggcctgtgtgcccagtggcttctgcagatgcctccccgaagcagtggccctggaaacctcaaacagcctcttgccaggggcatgaaggccatacagggccaggggaggcagaagcagtttgttgggccccttgcagcttccagataccaagcctgactgcggcagctccagagagggccccagactttcttcccctgaccccagtcctgggcacatgtccttgtcacctccctgccctgcactccagggccaccttccctggtttctctggggaggccatgtccagctgtccctctcccagctggtcccctgcccagggtggccggcaccacctcctgccatgtggcccatggccgggattgcacctggctctgctgacacctcctggcggctatatcgagtgccctgactgtccttgcctgcatcactgtgctgatgcccccaagggcttccaaggcccgtcccaaggtttacatgtgccagtgtgtgcggtgatgcggtgacaggccagggggctgcctcactggggcagggctgcgaggggctgtggatgccagcggtgtgttcagacctaatcaggaggtgtgtgggggctggggagcactgctgcctgggagggttgctttggcggtgtcagttggcagctgaggcacacgttggaggcctgcccaggacggctctgggtatggggatggagacagctcccatccccttgtcattctgctcttgcctggcttagccttctggtcaacccatagcctcctgccgttggcatggcacacggcatcccggatggctggggcagaccccagggtggcgcgggcagacactcgttgggaaagtctgcagggacttccaggtggcagggctggttctaggccagctccctacctacctctcagggctgctgttgagggtgaatgagacctggcaagtccagggagcccctaggtaccagacagcactgaatttgaacctgatgtctgtgctagcatttccatcaccaagaaccccgtttttggtatgtctcatcatcaatcccatgctttgtaagattttaatagtaatgataaatcccagcctttgggaggccgagacaggaggatcatttgagggcaggagttcacaaccagcctgggcaacatagggagagctcatctctacaaaaaacataaaagattagctgggcatggtggcacacgtctgtagtctcagctactcaggaggcagaggtgggaggatcgtttgtgcctgggaggttgaggctgcaatgagtgccacagcactccagcctgggtgacagagtgagaccctgtctgtttaaaaaaaatagaagtaggccaggcacggtggctcacgcctgtaatcccagcactttgggaggccgaggcgggtggatcatgaggtcaggagctcgagaccatcctgtctaacacggtaaaaccccgtctctactaaaaacacacaaaaaattaaccgggcgtggtggcaggtgtctgtagtcccagctactcgggaggctgaggcaggagaatggcatgaacccgggaggcggagcttgcagtgagccgggatcgcaccactgcactccagcctgggcaatagagagagaatcgtctcaaaaataaatacaatacaatcaatacaatagaatacaatacaatagaatacaatacaatagaatacaatacaatagaatacaatagaatacagtacaatacaatacaacacaacacaacacaacacaacacaacacgtagtgataacagtgaagcacagatggcgtttgttcaggtttgttttccgttctgcaggagcagcagcactggcctgtcgacagtgcaggtggctggcaatggccttgctgacctcgagccgggcccacgtggggacctttggagcacagcctacgatcctggtgcaaggaatgtcccattcttctgatgctctgggagggctgagcatcacttgtgggtccccctgccctgtcatggcctcttaaagcctgagcatggggcctgccccacagtgtgggagcctggggccagagtcccaccgatctgaccccttttgtgctggggattttgtgtgcatggacttgtttggtcttcacggctacccagcaacctgggtgtgttgtcatcaaccccatcttaggagtgagtaaactgaggcctggtgggatagtgacctgctcaaggtcacgaaggactgtcctgggagcatggctttgtctttacaactccggacccttgctcatcctttcccagaggtcatggccccttcacccgttcataggacgtcaaaggaggaaaccgaggcttgcacagagagggagtgtggctcgcccccaggctggcacgggccgacgctgtggtggtttctccactgaggtgcggggaaggcaggagctgggacccaggctgggggcctgactctgctgctgccctggtgcgtcacctcaggcgtgtcctggggcccctggtgtcagcatctgcactggacagtctctggggcaccctccagcctgagcagcctgctgcgggggctgtactgtgctcagtgagcctggctgccccttcagacagaggagagtgctggggctggcttcaagcaggcctctttgtttcttcttttctttaaattgcctgcacttgagtagcctttatcacacagtgcaggaatctcaaagggacaaaaaggcagtctcttgtttctcctcggaatactctgcacactccagcattttctttccttcttcttctcattttttttttttgagacagtgtcttgctctgttgcccagtggcacagtcatggctcaccacagctcagacgatcctcccacctcagcctcccaggtaactgggactacaggcacgcaccaccacgcccactacatttttgttttgttttattttttgtagagacaggattttgtcatgttgcccaggctagtattgaactcctgagctcaaggaatccacccaccttggcctcccaaagtgctgggattacaggcatgtgctaatttttgtatttttagtagagacagggtttcaccatgttggccaggctggtctcaaactcctgacctcaagtaatccttctgccttggcctcccaaagtgctgggattacaggcgtgagccacctcacatggtctgaccggcattttctttctcacactgctgtactcctgctgctcttggctcttcctgtccctgggaggccactcctcgcatcctgctgaggacctgcaggatcctcaccaattccatgtgccagccttttgattctataaaccctgggcctcagtttccccatctgcagcatggagatcacattagtacctgcctcaaggggttgctgagaggatcaaatgagatgtaatgaaagaaatttgcataggccaggcacgcagaggacaccccaggacaccccagcacatagtaggtattcactaaatgttagtgggtgttgtagtgtgggggtaagctgctcaacgtggaatttctggatgcagaagaatgggcattttgatggccatggggcatggaggacccagaccggtgaggtctggccatgggaggccaggctgcaccctgatgcccgcagccacctgctgtgggccccctgtctttcacgtgccttgtgccccagccactctgcccggggtcctcccgtgttgcctccttccctctccagcgaggcccgtgcctctggcccttccctacgtccttccctccaaagcacaagtggttccatgttgcaggcgggccatggttgtctctgctgggctgttggcattgggcgggaggaccctctggcagccatggttgcccctgtgcagctgagcatctggcctccccaccggatgttaggggtgctcccgagccatgctggtccggagcatcaccggggagggggcgctgccaggtggatagtctggggatcccccgttctctgcaggtgaggaagtccctgtagggtagagaggtggggagggtgtgaggccctggaggccaggccctggccaggtggccttgcacagccgggcagaggcagggcagggctgtggagggcagagccttggtcactcctcctcaccctagcctgctgcacacctacaaggtgaggatagagaaggtagggcctgcagtggccgtgtatgaggccagatggcacagcctgggcctggcatggagcaggcacttggttagatgggagaaccttccccttgtcctgcatcctctccagagcccaggacaggggccccagaacctcagggcaaggggccctgcctgaaggtgcatggccaccccctgctgcccacaggtgcttggcagtggcgtctgcagtacctcaggacctctgatggcacctgtcctggggagaggggccagtgtctggcaggtcgcagccaaacacatccatccacaccgtcgaggtacatctgcccacgcaaaagcctgtgcccacttctcggggcctcagtttcccccgtgccatggagcgcattggccttgttgctgtccctctgagggaccctggggaatagaggtggcctggggcagggcggcgcctcttgctgctcacatctcccagcccttgtggctccttccctggcaggcccagaacttctgcagtagaacagggacctcctggaacatccggaagtcaggtgagggcagtgaactaggagcagggattacttctgttgtcagaaacctggtgatgctcctgcatgtggcatggtgtggggctgactttatgagtggaggcggagcaggggctgcaaggaggggttgtcatcttgcccctgtgggtgacccttagagggtcacacagcttggtctccccaggcccagggtagagggagcagccgaagtgggggccctgccctcaggctgttgctgtttggacgttggagccagacagacctgcctttatggccactcctcaccagacgcccaccgtgtggcctctctaagtcacctcttctcccgcatgcttgatacaacagataagtgaacctcccctactcccttgtggagtcactgagagggtggacaggggtggtctggggctgagggtggtgttctcttgggagctgtgcacttccagatggccccatctaatctccacgcgccaggcactgctatggcatgacgctgataacccggggaggtttgtctgtaatctccactttacatatgtccagagaggtgaagccacttgcctgagggcacacagctaggaaggggcagagttgcagttgagcccaggccttggctccagagtgagtgctcacaggtgacctgctgactggctctctgagatggtaactgcagaacggccacctgtgggactccacagcagagaagccatcaggccacagggagagccggtcactggggcctgcgcagtcaggcagcctctctgaactggtgaaaggcaagacgacgtagtagctaggacagtcacagggaagagcatttcaggcagagggaagggcatgtgtgaaggccctgcggtgggaaagcaggtgtctcattcagagaagggctcactcaagggtcgggggctctagttgggggtgagtgggaggagatagggcagagctgccacggccagtgagagttgtgttctagtctgggggtgcctctctttacctgtggtgtagcctcaggtcagtggctgaattctggtcagtttcagtttccttgcccctgcctgggggctgctatgaggctggagtatgtggaggacaccccaggacaccccgtgctgagagccgggacaggcgggcttatcgtgggttgccagtggccgccgagagcctctgtttgttgtggtgatggttgccacaacggctgcacctgggcagccctgggctgcctggccatctgggcccagctctgacgtctgcagcagcctgaggcctgtttctaggctgtctccatgacggcctcacccactccctctgacagctgggtggcttccccatggagcctgtggccctcctgatgcaggcttggtgtccccaacaggccggtggatgcagaggccagtccatataccacccaggcctgcgaggagcgtggtccccacccatccagcccatatgtgcaagtgcccttgacaggtggggaaactgaggcttggtgaagggggggccacatgatacaacattcccaaatcccaaggcatgaggtgggtggcaggctggggccagagggaccaagagcagagagagtgcagggagggtgtggcgtggaccccacagggaaagggtgggactcaaggggctgggggcaaggtcaaggcccagggtctctgtgcagagctttaatttttaacagaaaatattttatattctggttacgaaaagcctgacatcaggaataaaagctacctataattctcattacttagggcagttttttttttcacctctgcagagaggctggtcatatccatggtgaccatttatgggccacaacaggtccccatctgcgcagtgaaccctgtgctgagcaccttgcagacgtgatcttgcttcgtcctgcagcactgtgcggggcaggtgggtggcatttctgcctcgagctgttttgtacatgaggaacccaaggtgcagaggagggcaccatgccagggtcgcagagctggagtttaccacggctgcgccactccaagcccagagcctcagaagttcagagactttggcccagaggcaggatagaagtggcctcagaagctgctggccctgtgtgccatggtttttcctgttagaatgtgctgagcctctgcatctccagactctgttgccgtttcttgttgagcacgagacttgggcccctccttccgcctcagggagggctccctgtggcaggggtgctgtgagccatggcctggcctgttggggtctgcgagtcaataaactcaggagtgactcctggccagacccctgacttgctgtgcagcctggggcaagtggcttcacctctctgagcctgttccccaagtaaagtgaggttgggagcccctccctgtagggctgtgggagtatctggagtcacagatgagaagggccctgcctgtggccggtgctgtggctgtgacagactcgcagtgagacccatgcggtccctgacagccagggtgttgctgcatcttaaaatgagataaaaacgctgcgcacaggagtagtgactaggcgattgattcatggggtgagcagttagcaggcaggcacccagtgcatgtggcggcagctgctgctgctgctgctgctgctgcttctgtctgtggacgctgttgtttcctgaagcctctggggcctggcagcggggtccccggggtggctttggtggaaaggctgcaggtatctgcttgcctggctcctgcactctgcccacctgccccaggatggaccctgggacccctgtccctgccaaggctattctgtttcctgttgttctggccttgtcttcccagtagcggtaaccacccttcgccctccatctgggctgggttggctgctgggccccggtgcgtggctctgagatggggccacaagtctgtgttgcaccgtggccaaggctggatctgaacctggcttggaggcggcttcagagactggggtcttcttggcaggcggcagcagggccatgggcagtttctaagccccagtaccagcagccagggtgagccagcagcagggagtggcgggtggtgggtgagggccaagatgtggcaggatcatgcttgggaaatgatgaggcagaagctcccacaagggcaggcatgtggccagcatgtctgtactgggtggtctccgggagccgtgtcactcccagccctgctgcctgatggtgccagagcaccaggtgaccctggcatctctgatccttgcttctcctgcctgtggaatggcggctatgccttattcaaagggcggccctgactacagggagctctctctgcatgccagccccactgtgcctggagccccagaaatgctgaccctccgttagtaccagctgagtgctgtgcacctggccaggctcttgtagccagcctgagaggtgtggacactggggcctctcgcctgtccctaggggtggagtgaggaaggtactgccccgggactctggcctgcctggtgcaggggaggggagagagccagcgcttttcaggggagggagagaaacgggcatcgggtgtcggcctccagggtgagcagggcccagcagagctagcctggagggcagcccgggctggagtccccgcctgctccaccgcctgttgccctttctgggggcctggccttcctcatcttggatgcagtatgagccccatcctgctacctgcagctaatgaagcccctgtacagtggctgctgcaggtgctggctggacccccgctgggccccttctcaccccacatcccattgactagtcaggcagggcagtgaggacacctcacagatggggaaactgaggcccagggaggtactcaagatgtgcccagtgggcagggctgagataaggccctggagtccagcctccaggcctgggtctgtcctgctctgctcccctgcagggctggtgggcctccttccccctttgaaggcctaacggcctggcttggagagagggggctcccggcatgggtgatggcagaggctggcacccttgtgggccagggcctgatggctcatgggagtgcaggggacattgatgtcaagggataggccagacgcctcaccttctctccattctaggaaaatccaagaggaagaaggatctacggatatcctgcatgtccaagccacccgcacccaaccccacgtgagtctgcctcagtttctccctggctcaccctggagaggcttcccgaacagggctcaatggaaggagtgagaggcaggtggggccagccctgctttacctcgtcctgtcctgggcagcccctgctgtgcatacagccaggtgacggctgctgggggttcatgcagcaccatttgctctgctctgctcacttctcaccctgtcttggaggctcgatgaggccgtgcccagctcagtgtagatgctcagcagccagtgagaggaggtggccggagaaggcgcctccggggcaggaggcacctcgtccccacgccaggccccacactggcccatctactgctgcacttggggaagggtgtggttctctctgaagctcacggagtcttctttctccacagacccccccggaacctggactcccggaccttcatcaccattggagacagagtaggtgccagccgccacccctgcagggcctctcacttcacctgacgagcgggtagagctgaccctgcagggccactttggggggaggtgactgaggggtcagagagggtcaggctctggagaagagcctcgtcctgcgctgctggctgtgtggccctgggccacccactctttgaccctcctggtgggaatgaggaccatcggctgcctgactggagcttggcgagcccagagctggtaggaaggtttctgagctgagagcaaggccctgcacctcatcctagccctaggggagagtattgaacatgcaggctcctaggccgccctggacccgctggatcactccctcaggccagcacctgggcaacctgcattttatgcttccagaagcctcggaagggcactagccattcagaatcctggctcagggaccgtgctatgccccgttcctcccaacagaaaccctactcccaggccaggtgcagtggctcacacctgtaatccccacactttgggaggccgtggcaggaggatcacttgagcctcggagctcgggaccaggcctgggcaacatggcgaaaccctgtctgtacaaaaatacagaaaattagtcagcgtggtggtgcgtgcctgtggccccagctacttgagagtatgaggtaggaggattgcttgaacccaggaggtggatgttgcagtgagccatgatcgtaccactgccctccagcttgggtgacggagtgagaccccgtttcaaaaaaaaaaaaaaaaaagagctgggcacggtggctcacgcctgtaagcccagcactttgggaggctgaggcgggtagatcacctgaggtcaggagttcaagaccagcctagctaacgtggtgaaaccctgtctctactaaaatacaaaaattagcccggtgtggtggcaggcgcctataatcccagctattcaggaggctgagacaggagaatcgcttgaacccaggaggtggaggttgcagtgagccaagattaccccattgcattccagcctgggtgacgagagtgacactctgtctaaaaaaaataaaccccattccctaggcctgtccttgacgatactccctccaggctgtcgcactccctgacactcaccatctgctgtcctgttcatctacttgcttactcctttttgtgtccctcccaagagagggaaacatctgtgaaggcaatacttttgttttgttgtcactgtgtccccagtgcctaaaacacattgtggatgcttggtaaacagtttctgaatgagtgactcattctagccagctgagtggggtcgggaaaagagggacagggcacctctttctcagagctgtacctgctggcggggcattttgtctcagtcacactccatagcagccttggggtgttggcactgtgcctgttttatagagggcatcgtgaggctcagagaggttaagtgacttgctgagggtcacacagcagggagcggtggatatgaggtttgagcccagatctaatcagctggtcctcttcatgctgcccaggtatctccactgggcatggggtgaggactggcttccagcttgctggccactgactctcttttccatccttcaagaactttgaggtggaggctgatgacttggtgaccatctcagaactgggccgtggagcctatggggtggtagagaaggtgcggcacgcccagagcggcaccatcatggccgtgaaggtgagcagggcctggaggcagctgggagggctccctggaggaggcgggctgagctctgccatggggccctgcctatccctctcagtgatcagtaccgaggctaggctttttggggcacactgggcagtggccccctgagctcctggccctcctgtcatgagtgtgggtgttggcctctgccacggcaacctctgaatggcagtccttccctgcagcggatccgggccaccgtgaactcacaggagcagaagcggctgctcatggacctggacatcaacatgcgcacggtcgactgtttctacactgtcaccttctacggggcactattcagagaggtgcgtccttgcatgatgcagctggggatctccacctcccacccatcagtcgcctgcaacccactgtcactcagtccctccagtacgccaggtgctggggacacctggcatactggcaggaggctcccccgtctcttggctgttactgtcctgctcagtgcctcagtttccttgtcagtcaaatgaggccggtggttgtgggtgcctcctaaagttgacacggaaggtaaacgacatggcctggggcctggcattcagctgcactcagttctgtctgtgtgaccattcgcatccccatggcatacagggcgtgggaatggcatatggggcgtggggtgcccaagcaggcaacggccatggagatatgagatctggattctgggttctaggtttgtggacaggatggggtgtgtgctgagagagtgactgaggctggaagagtggagctgccttccgccaagccgggtgggtgtgggtgagcagggaggccgggagcctaggcgatgctgggctcatactggtcacttgcccctcaaagagctgtggcagggtcagggcatctgagtccagccatcgggcaaggtcagggctgcttcacctgtcctcactcgtcactcatgaagagctcagcatcctctgtgccagcccctagccgatggggcccctgcagcctgcgggtgccccctgcgcatctcccaaccttcctgtcaggagggtcctcaggagttcactggggaagagggagcaggtccttgcaggcagggagccatctgccagggtcagctggcatgagggtgtctgtcggtcagcagggccggctgttgccatggagctggtgcaggtgcatcctgaagctctggtggagggacccagcgaggctgtgtgctaatcctcttcctccctggagacacctggaattagggatcagatagaggaggctggcgcccgaacctggcagtgcaggcagagttggagggtgggggaagcgggcaagtgggtggtgggtgggagcccggtgaactgtggctgagtgggtgggcacacgtcggagagggggctggggctggggctggtgctggggcaggcagtgcaggtggtgcagacacgggcagcccggcagcctggctgagctctgggtgtcacccacagggagacgtgtggatctgcatggagctcatggacacatccttggacaagttctaccggaaggtgctggataaaaacatgacaattccagaggacatccttggggagattgctgtgtctgtgagtggcctgggtgggctggcggggggtcctaggtgcataggcagaggcccagccctgccagcaggcatggagcctgcctattgatggtgtcttgggcagagctgggcatcaatgtgccccctgaacctgggcagctgccctgcataggcccttctcctccaccccagaccagagcctttgtgcttaggagacctccgctcctggggctcctggagccccacagatttggcagatccaggtgtctgagccattgattccaactcttgagttccagatcattttttaaaaaaggaatttagtatttacaacagcgtcatactaaaaatgccccggggcagctcacagaggtacaagctaagttgggggaaaggttagcatccaaaatgtgtgctttttgagtctaaaaagtccttgagggagggcagcaacactgggcttgagcattccagtagccaaaggaaaaaggaaaatagaaccagtgagactggttcaatcctcactgcatctggaaacatttacaatatacccctgcctcaggctccccacccagccttcccaagggaaatggctccaagctgctagaatactggctctgccacgggaggggagatgggacagggaggctgccaagagctgggttttacccaagaagagtgtggcaggcagtgatgatgcctccctgggaggtgagcccgggaggatgagaggaggcaggaggccgagtgtgtctgcaccaggattgttaggatgctggggcaaatgccaggacagggcaggaggctgggatgagagggtgcgtagcctgtgcagcgggagcgggagacaggtggacatggatggggtcttactgctctgtcgtttttgacgtgaccaggaataacagagtcctgtctcttccctcctccccaccccaccgccagatcgtgcgggccctggagcatctgcacagcaagctgtcggtgatccacagaggtcagtgcccggcagccacccaggcacggtgtagccagtgggagggatcccaggccaaggcgggtggacgtctccctatgagcaactgtggctccgagaggtgataggttgtgacgtgcccgatggggttccagccgctttccacctgcagccctgcagctgcctcccctcaggtttgctggtgctcgaagcaaggactggcttgacttctgtcctgagaaaggtggactgggttctgttctgatgtatagtttacaaatcgtgaaactccagcatagagtgcatataatcatgttcacacccatgcaaccacctccctccaagatgcaggacaattctctcaccccctcccagaatgttctcttgggctccttccctgccatcccccatgtgcctaaggcacccacaagtctggttttcccacagtgggttggtttcgccctttctggaacatcagcctcgcttgatgtttctggacccacctgggtctggtgtggtctcagtttgttcctttttgctgctgagcacaagtctatttttccagatttactgcttttcaaaaaatgaattaggcttagttcccattgtccactgggtgcccatcccagccccccaggtcactgtggttggcggttggcacggaaccttctggtcctttttatgtgcatttccatctttacacacatccccatggagggcacggggatgtgagtgtcctatgcgcatttgtatggagaatccctgctgggctgctctcccatgctggtctgtggggactccatgtccaaacacgcagatcctgcctcccaggctttaattgatcctgctgccctctgggagcacccacacaagccaggctctcactggacctcatgtctggagggcggatgcaggcacggtgctcccagcaaagcacctggagtcctgccttccttgcagtggccgggccgggctgggcacgtcctggctgttccctgaggaccaagtatgactctcagctggcccggcacctcttgcagcctcagttccctggtctgacccttgggaccctggtgcaacctgcccactggggcatgggagggggcacaggaggggtcttgggcgagggaggggggcacagctatgcagagcatggcacctgcctccagtcgtgctccacagacgtggctgaggcatgtccctccctggcagatgtgaagccctccaatgtccttatcaacaaggagggccatgtgaagatgtgtgactttggcatcagtggctacttggtggactctgtggccaagacgatggatgccggctgcaagccctacatggccgtgagtggtccccaagccccccaggctcaggagaggatggggcggggagaaatctgcccaggctggccaccccggccataccctctgtccgtaggggcagagcctccccacactgcgtttcctgctgtagtggggccacctgtgtcttgctgcccaggggcagcccttctgtaccccgttgttaactgacccccacagtgccccagttgggtgataagctcatggaccacctctgcggaggacactggtgggctgtgcaggtcccgccccgccctcattgtcaggagggccttaggggcctgctcccgggtagggtcagaccgatgcaagggttgggccttctaagcatgacccaggccctcctagcctcagtttcctcccccgtcacatgggcaggtgggctaagctgagcgctcagtttggggattgggaggcaaggcctagccatgggggcttacctggggcgggtgttcacgcctcactcttccctcctgcagcctgagaggatcaacccagagctgaaccagaagggctacaatgtcaagtccgacgtctggagcctgggcatcaccatggtactgtggggggccagggcctgcccttggtggtcaggtggggtgggtggagccgtgcctggggccctgagcttttgggggactcatcaaatagtttaggttctggaaagaagtattggcttcaaaatctgagaagaaaatgtgccatcagaaattaccatctatttaagggaacctcctagggtcagggtcactcatcgtgaagtcctgggtgctttgtgatatggtggccacagggctttctctggagttcttggtgcttgttgagaaatcacagccaatcccaaattacgtaagttcctggtatgtaaatcatgcaaaagcaagatggtaaagatcttttcaaaaatatttcatagcagaaggtttgttgtcggtggcgtcctggtacattgcggtggggtggtagaaagggtgggcgggctctcaatcctgggcctgtggaagccaaaggcatccctggcttgggtagggtgagggcagatgtggcagaagtccgaagtccaggtgtagggatgggcccagagcagttgcttctggagttgcctggcagaaccccatgccttccgtgttggggctcaggtcaaggtgtgggtgagcccgctctggctcccctgtggacagtggattggagggatgggaagaccaccaggatgtgtcccccagccagggctaggaagctgtgcaggagacgcgtggaaggacgatgccatcagcaggtcgggctcaggctggtggccttggccagttgagtggcttgggaccaatggagtgtcctgggcgtcagctccttccctgcccagggaagcctggcccaggacattcctgcttgtccctagtccctttgactgtttggtgttggggatgaggccgtcagatagaatcagtaagatgtggtgagaagcgctggcggggtgttttccaacaccgcaacccattctcggattctccagacacccacccagtgccctgcagttccgttcggttctgatgctacctggagttcgcacagaccccacaggttaagggctctgtcccaccagactgcccccaacatcacacaccagttggaagtagcgggtctcccatactactggactgaccagctacaaattgggggtccccatgaccctctcgtaaggtttgataatttcctagaatggctcacaaaactcagggaaacactttatttgtgtttactggtttatcagaaaggatataactcagggccaaccagatggaagagactcacgggggaggggtgtgagtgtggggtgcagagctgccgtgccctctcagggcctggcaccctcctggtacctccctgtgcttgcgaacctacaggcttctcaagctcatggaattttgttgtttttgacacagagtctcactttgtcacccaggctggaatgcagtggcacaatcttagctcaccgtaacctctgcctcctgggttcaagcgattcttgtgcctcagcctcccgagtagctgggattacaggcaccaccatgcccagctgatttttgtatttttagtggagatggggttttgccatgttggcgaggctggtcttgaactcctgacctcaagtgatctgcccgcctcagactcgcaaagtgctgtgattacaggcatgagccaccacgcccagcctcacatggagaggttttttgtgagagagggtctcactctgttgctcaggctggagtgcagtggtatcatcgcagctcactgcagccttgaactcccaggctcaagccatccccctacctcagtctcctgagtagctggaactacaggtgtgtgcccctatgcccagctacttttttaatgttttgtagaaaaggggtctcactatgttgcccaggctggtcttgaaatcctgggctcaagcaatctgcctacctcggcctcccaaagtgctgggattataggcacaagctactgcacccactgaaagtttttatagagcacagtctccaggcccccctcctctcagcatcagttggcgggtgatgctgagagttcccaccctctataatcagctgggttttctggggagcagccccatctgaggctgtctaggggccttaccctgagtcacctcattagcataaactcaggctccttgtggataacaaagccactcctgtcactcaggaaattccaagggttttaggagctccatgccaggaacaaagaccaaataaattcctttttatgccacgggggtggagaagactggagcaggtaggggtggctctggggacaggtggaaggccactgttgcagatgcggaggcctctgcaaggagggcaccctgctgacctgagggcagggtagaccagggggtgcaagtgcaaaggccctgaggtggggctgtgcctgctgtgtgcctgggtggctgggtcagaggagagggagggagggttgggagcgagcgaagagaagtgtctggtgggtagagagttgacgcaggtgttgtgggttttactggtgttgctgctaccattgttatcatcatcatgtggttataactttatttatttttaatttttatttttttgagatggagtctcactctgttgcccaggctggagtgcaatgggacgatctcggcttactgcaacctccgcctcctaggttcaagtgattctcctgtctcagcctcctgagtaactgggattacaggctcgtgccaccatgcccggctatcttttttttttttttttttttttttttttgagacggagttgcactctgttgcctagcctggagtgcaatggcatgatctcagctcactgcaacctctgcctctcgcgttcaggcaattctcctgtctcagcctccccagtagctgggattataggcgtgagccaccacacctggcaaatttttgtatttttaaaaaagacggggtttcaccatgttggccaggctggtctcaaactcctgacctcaggtgatctgcctgcctctgcctcccaaagtgctaggattacaggggtgagccactgtgcctggccttttttttttttgagggagtctcactctgtcgaccaggctagaatgcaatggcacaatctcagttcactgcaacctccgcctcccaggttcaagcaattctcttgcctcagcctctcaagtagctaggattacaggcatttgccaccatgcccggctaatttttgtatttttagtagagacggggttttgccatgttggccaggctggtctcaaactcctgacctcaggtgatccacctgcctcagcctcccaaagtgttgggattacaggcgtgaaccaccacgcccagccttgagccactgcgcctggcctgtggctgtaactttataaatagtgtatctgtagacagtgactgggaaagactcaaagtcgaaataattttgtcagagaggtgggactgggccataccttcaattttctttaattggtgacatgtaatttttcaattaaaattttttttttttgaggtggagaggaatattcaggctgaaggcaggtgctgtatctgcaataacagttttccaagtcctaagtttgatgcaaaggacaagttcttgctgtatttagactgcacagaactggttggatattagagaccctgctcatgactacctcacacatacacacaccctatgtcccttccccatctccctgtctcccttccagttgtccatccatcatgattgttggggccaccatggctagtggccttctgatatggctggtggaacttggacaagtgtgtgctaagtgtatatttcagttatcaaatattgcatagcaaaccaccctagaacctagtgacccaaaccaacagcggtttcttatttctcatgtttccaccactgtggctgggctcagctggatggctcttctgctgtacctgggattggctggggtcatggctgggctgggctggtctggaaggcccaagacggcctcacaaacatgggcctcctctgcctggcctctccatgcaacttactcacattggcctgctccctgggcttcagagcatggcagtgtcagcagagttggagttctttcatgatggctggcatctaaaaggaagttctctgaagtgctaggcctggaactggcacagcatcacttctgcctcattgtgttggtcagcgagtcacaggccagcccaggttcaagggcagggaatgctcccggcttaatggaggatcagcaggtgcacacagcgggaggcggaggtggtcactttaggcacaggttaggtttttctttcacaagttacaaacgtagtggaaacctaacataaaaatagaggcacagtaaggggaaaatgactgtagttattctacctagagacacctcttaccccgtttcagtgccaacattgtgcattatattatatatataatatttttattacatataataaaatacgttttattaaaatttagagaaatacaaacaatatgtaatgcttctctttttttgttgttgaaacagagcctcgctctgtcacccatgctggagcgcggtggtgcgatctcggcttactgcaacctccgcctcccaggttcaagtgattctcctgcctcaggctcccgagtagctgggactacaggcgtgcgccaccatgcctggctaatttttgtatttttagtagagatggggtttcaccatattggctaggcaggtctcaaactcgtgatccacccaccttggccttccaaagtgctgggattacaggtgtgagccactgcgcctggcctcgtaatgcttctttttaaaaaactttttaaaaaaaattttgtagcattacatgttgttcatatttgtctctctctctctgttttttttgttttttgttttttttgttgtttttttttttagatgtagttttgctcttggtgcccaggctgcagtgcagtggtgcaatctcggctcaccacaacctctgcctcctaggttcaagtgattctcctgcctcactcaatctcccaagtagctgggattacaggtgtgcaccaccacatccagctaattttgtgtttttagtagagatggggtttctccatgttggtcagactggtctcgaacccccgacctcaagtgatctgcctgcctcggcctcccaaagtgcttggattataggtgtgagccaccgcacctggccaatttctctaaattataatagactcctgtatgtatcccttccaaagactccataaccatctgccaccattcagtcaccctgtctgctgatgtgggttgtttcccttgttcctgctgttttccttccatttcaaattctcagccatcctgggggagcgactgatgaaacagagtcgggagagtccccctgggtggggctctggcctcggcctccccccatcctgcaagggccccagagctctcttggcgttggctttttcccactcactgcacaagcctcaggatgccagtgggaatcacccagaacagacaggggtcatgccggggatggcccttggccaggagcaagtgctgactgggtgctggcctgttagtgttgtcgctggggagtcacaggggtgcgactacggtcctggctgggtctccgcccccatggtggggccggcccctggcgctggacattcaggctgtttcttagtatttcctggcagaaaacaccatatggcacatcttcgtgtctggaggctatttttgttgtttttcattttttgagctctttagaaaaaataaaggagtacgaggttgaaggtttggacacttctgcttttctaattataactctcatggccgctggtccttctcctgtagctcgtatggggtacttgctctacatattgcagtcagtgaaaattctaagagaaaagccccccaaatcggtacggttttgtcctgtgaacacgcatgcacacatgcacacacacgcagtgggccctgcctgtgtgggtgtgtttgtctgagctggaaagggcctctagcctgatgggaggcacagtctcagcacagtccttagggtcttgtccgggctccagttgccagtgccaagtgtttgtgctgaggtctcttccgttcatcatggtgatgacggccggcagtgagggcccttgtgctggagcctcggaattctctgttcttccaggccggggccagggctgacataacttgttttttccatccagtcatcatgattggagcccagagttggttgtaagctagctagtccgtcccttccatgatgacttcctgccaaccacagggctgggagcttggagcgaggacagagacccaccggcccgatgtcacccacaggaaatctggatccagcagggcacatgtggccacacaggccacttgtctaggagggaaactgctggggccctgcagaagatgaggctgcaggctcacgggtgcagaggcgaagcagcctcatggtctcacactctgtccgcggccttggagacagctgtgtgtgtgtgtgtgtgtgtgtgtgtgtgtgtgtgtgtgtgtgtagcatttcccatgtgcctcctctgtgaaaacagcccaaattaatgacagcagatgctgaagtctgagatggtcagatgttaggaaggggattggctgtgaccacctgggacctgcccacctggctcatgaggctacggcccaaagttgccagctcctcagatttttccagagcagctggaacctgcattgttttgtaaaatcttcagaattcaggttttctgaaaaccctatgatggtcccaccagtcccggtgtgggctgaatctgcttcctgagctgggtcctgctggctgggtcggaggagctaagagctggcatccccggctttctcgcctttgttctgctgggatgtggtagggagatcagctgtgcagctttgacgcctggctctggtaccaggatgggtgggagcccccaaccctcgctcctgggtgcagagcgtggttgtatctggggccggggcctctgaccccctgtccccgctgcagattgagatggccatcctgcggttcccttacgagtcctgggggaccccgttccagcagctgaagcaggtggtggaggagccgtccccccagctcccagccgaccgtttctcccccgagtttgtggacttcactgctcagtggtgagtcttgggtgctgctgagcgcctgccactgcccctccctggccagatccctgcaccttcctgggccctgttcctttattcctttggcaaataaacccccagatgacttggcatccaaatatgtaaggcagaaacagctggagcatgaggagcatttgacaaaacgatggtcttggtgggagattttaatacagttcttccagaagtggacaaatcagatagactgaaaaagagaacaaagtatatggaaaatttgaacacaaaaaacaagtttgcttttattgatatctagaactttgtaccaaattaaagaatgccccataggagccttataaaaatcatgtttgagaggctgggcacggtggctcacgcctgtaatcccagcactttgggaggccgaggcaggcggatcccgaggtcaggagtttgagaccagcctgaccaacatggtgaaaccccgactctactaaaaataggaaaattagccgggcgtggtggcgcatgcctataatcccagctactcaggaggctgaagcaggagagtcgcttgaacccgggagccggaggttgcagtgagcctgagccgagatcatgccactgcactccagcatgggtgacagagtgagactgtctcaaaaaaaaaaaaaaatcatgtttgaggttacagaaggaataaggaagagggcaacttctctgaacttaattaaatagagcaagaattgggtaaggaagaagcggccgggtgcggtggctcacacccatggtccccgcacttttattgttgaccataatcagcaacagaggagcccagcagagtccctgggcagtctgacccctttaattgtggactaacttctcccagaacccatgataaggagtttctctcctgattgaggataccaagtgtgtgactgttaggcagagcattgcagccccattttggtgttgatatggaaattcctaggtcactatgcagacaagaaaaccaggaccccaggagccagagaaacttgctgcaagtctctagtttgctcctatgaatgcccctccaccctggaagaagccctagacagtcctgtcccttcttccctgggtgcacgtgtcccctgctgctaggcctggggcaatcctggggtggtttggctggcccttgggggctgggcttcctccctgccagcctggccacagctgcactattctctcctagcctgaggaagaaccccgcagagcgtatgagctacctggagctgatggtgagtatgggcgggaggtgcctgccctgctcttcagggctggctggggctgggtggggctctggggagagggctgcatcctgcacacagatgggtagctcctctggctggccctgtgttctctcctttaggtgctcggtcatttgtttgctcctgcatacctggctccctcctccctccttcctgcatgccaggccctgggaagggtacacaggcagtgtgtgacagaatggggcagaggggccaagggtggcatcagggaaggcttcatggaggaggtaccatttgaactgagcctggaaggatgaataagggttatctcctgatggagaggctgtcccaagcagaaggtccagcatgggcagaggcctgacgtgtggggggaaagggaggttagtgtggctggagagtgaccacaagagagctgaggaggagccacagatgccatctgtgacagtcatggagggcctcctgggggtggaggtcctagaaggatgagtaggattttgccagtcaggagaacacttgggctggagctggttggggaagagtggccacctctccctcccgctacccctccatggtgactgtgccttctgtcacccccaggagcaccccttcttcaccttgcacaaaaccaagaagacggacattgctgccttcgtgaaggagatcctgggagaagactcataggggctgggcctcggaccccactccggccctccagagccccacagccccatctgcgggggcagtgctcacccacaccataagctactgccatcctggcccagggcatctgggaggaaccgagggggctgctcccacctggctctgtggcgagccatttgtcccaagtgccaaagaagcagaccattggggctcccagccaggcccttgtcggccccaccagtgcctctccctgctgctcctaggacccgtctccagctgctgagatcctggactgagggggcctggatgccccctgtggatgctgctgcccctgcacagcaggctgccagtgcctgggtggatgggccaccgccttgcccagcctggatgccatccaagttgtatatttttttaatctctcgactgaatggactttgcacactttggcccagggtggccacacctctatcccggctttggtgcggggtacacaagaggggatgagttgtgtgaataccccaagactcccatgagggagatgccatgagccgcccaaggccttcccctggcactggcaaacagggcctctgcggagcacactggctcacccagtcctgcccgccaccgttatcggtgtcattcacctttcgtgttttttttaatttatcctctgttgattttttcttttgctttatgggtttggcttgtttttcttgcatggtttggagctgatcgcttctcccccaccccctagggtaccagcaggcagagccttgccctctgctcaggctggggtccagtgggaggggcccaagatctctgctcagagaagtgcagggggagccttccagctcactctccctgaggactggcttgacaggggctatgggtttgctttggtgttgtttttaaaaaaagaaaatatatttttttgaaaaaacgactgcccatcccgggtcctttccctgatgggttggggcagttacctggttgctgttttaattaaaaaaaaaaaaaaaaaaaggactaaaggttgtgtgagattgtgtatgacacctgtgagcccccctcttacttggggaaggttgtggcccttcaagggacccttgtctctgggccaggggcagggtgtcgtgctcaggggagggaggactgccaacctaccaggcccttctacatctgaggacacagaggcccccagagggctgtgatgaggtaacatcctgtgatcatccaggcaccaggccctgtactgacactggacagagcagcgaacacacaggtccagtctgctggtggcggccacccatcccactgtcctgaagtagtgatgacagccaggtcacagagcagcgagcaccctgcacactttgcctgggctggacacggtgacctcatggaggttacctgacctccagtttacagatgggaacaacagacccagagagctgacatcacttacccaaagccacacagcttataagacagaaaaacagacttggggacaggtggtgggctccggagaaggctccgaggggagtaggggcagcctgatgaaggcgccctgcagtctggccctgtgacgctggcagcatggctggggcagcagggaatttgctcacgtaagccgggtgtgctcagcttcaggtaccgttaggttcgaagttcagctgatggcctgaaggacttgcatccaccttggctgttcatccgtctcaggttcaccccctcatggggaccagtcaggacccagggactccaagagctcggcacaccgtgcccagggtactcctgaagtcccaggactggctcttaccagctgggaaggagtcgaattcatccccaggccaggagggtgggtgtgacagctcaggtcaggtcaggcatgaggggactccgcccactacagctcaaggtctgagagcagggtctctgtggtcctctgaggaagcttagggtgtgttcccaggaggagggtccccatggggtctgtctctgcactcctcctgtcctccagccccagtctgggacaggtctctgcccactaacccttccctggcacaggggcgaacagttcctgggagctgttgtctccctctctccatccttcaatcatgaagacttgttttcaccccagggcctttgcactggctgtcccctctgcgtagaacaccccctcccccgtcttcctgtggctggctccccccaaccccatcccggtctcccatgtcacctcctcagcgaggtcttccaggaccactctggctcaaacagcctccgcccactaggcccagccaatctagcttattatcctgggttatcctggccgagacctgacttgtcactgttgtgtcgtcagcgctgagaatgctgccgacaccgagggagcgctcggcttctgctgaatgaacacatgaaagaatgaatgagggagggagggaaggggggagggagggaatgaatcccttgccggggcgcggccccaggctctgtctcctgtagccgccagggggcggtagagctcggcttcaaccgcgtgtcctggagccccgcccggccccgagcgcccgtccgcgtcctcgtgcgtcctcggcgcagctggaggccgcgggcttgccacgcgtcagcccagttctcggcctctgcggctgtcctgcccgtgtgcaccccctggcccggccctcggggcttccggggactctgcagcctgcagacagcagcagacccaacgcctagagatttaccgtgcgcgcccctgaagttacccagcgccccgcaggccaccgcgcccctcgcggctcgcaggcctggctggacgccgcaggcctggctggatgccgcagcccttcacagagagcaggctcctccgcgcacgactgcagccccagtcgtttgcagttcccttgccatttatgggaccctttggcttttacagagcgtgtccagccatcagagtgcggaagccagtgcgcaggtcactaacatttacaaagcacaggcccttgacagtttatactacccgtggaggtctcaagcggcagggcccctctcccctgttccctgtccctgaggtgggggaatggggatggggagcggccgcccccccctcccccgaggccggacgcccgcatttcctgtcaggcagcagggtccgggcaggcgcctcttccaggcccgggattaatgagtctctggactgggagatggcagaggcatgtagactttgttcaattacagccgtgagagcctcctcatcaggcagcattaaaactgcagcagacaggccgggcgtgttggctcacgcctgtaatcccagcactttgggaggctgaggtaggtggatcacctgaggtcgggagttcgagaccagcctggccaagatggtgaaactgcgtctctacttaaaaaaatacaaaaattagacgggcatggtggcgcacatctgtaatccaagctatctgggaggctgaggcaagagaatcgcttgaacctgggaggcagaggttgcagtgagctgagatcgaggtgctacactccagcctggggggcagagtaacactccgtctcaaaaaaaaaaaaaaaaagaaaaaagaaaaaaatgcagcagacaggcctgctcaggagcagggaggctgcggagggaggatttggcgaattcccttctagaggccagggcgtgaagcctctcctccagatccctgctgcagctaccgtcttcggtgggggcctcctcatggtccacagtgccccaccccgggcgcccacccctgcctcccctgtaccctgtgcctggctccctgcgcttcaccccgagcctggcggtgcagggcctctgcaggagctgtcttgttctcctcccggaacgctcttccccggatgtgctcccgctttggggtctgctcagatgcctccctgaccacacttgtcctgccgcactttcttcacatttattcattttcattcttgcccactggccgcctcccccgcaagaccaggaggagccggccttgctcacaggagacagggcaggtgcaggaaggctgccgcaaggcccagcgcaggcagcaggcagcagggctgtgcgggaggtggtctggggacagtgctgccattccgtttattccgggggtctgctctgggaaggctttccaggagcgagccgatactgagccgataggcgcgttgtgctggctgaggactctgcacctcagagaagggaagccaggagctccaagtcaaacagcaggcagcacccgtgccgggggttagcgtcccggctgcgctcccgctcccatgccctccctcggggccgagctctgcttctgagggcggagcccaaggaggcccgtgctgcccacctggcggctcaggctccagcagccccgaaactgtggtcaagtccctcttcccccagggaatcggcaggggccggaaggattgaatatgtcccccaagctgctgtgttgggaggtggggcctcacagcaggattagatcctgggggcctgccctcctgaatggatgaatgctgccagccatctcccagtgggttagttaccgagggggttggttgtaataaaagggcgttttgccctcccctgctgcctccagcactctcttgcctttcggccttccttcagccatgggaggacacagcagggaggccttgtcagatgccggcctggatcttgatttcccagcctccagaaccctgagaaatttctgttgtttagaaagtacccagtctgggctgggcacatggctcacacttgtaatcctagcactttgggaggccaaggcgggcggatcgcttgaggccaggagctcacgaccagctggggcaacatagcaacacctcatctgtacaaaaaagccaggtgtggtggtgcatgtctgtagtcccagctactccaggagctgaagtgggaggattgcctgagcccaggagttcgaggctgcaatgagcggtgattgccactgcactccagcctgggtgacagattgagaccctgtctcaatttaagaaaagaatgaagaagaaatcatccagtttgtggtattttgttatagcaacaatgaaacagatgaatacaggcccccaacaccagcattatctcatcctggtttccctgtgggcaggggctgtggtgggcaggcaggaccagtcacctcatcttccaacaggggcttcgcatctgaccacacctctccctgatgcaccaatcctctcaaccacacccccaccaaggcctgctggcctctgcttgcatacctgccctgatggggagctcactcccatacagacgcgattcctggagggatctgggttccatcttcttttccctgttctagttccccaggcctgtgacgtgaggggcccatgtgtaaaccctggctcactctcaatgctcatttctttgcctcttgtgaaagctgttgcaaatccttttggaaaccaggtgggagggtctatatatacactggctgtactatgtttatcagagcttgtgtatcttcacgcccagggcagccggcttctcctggaggttacagaggctcagcgaggctctgacccctcctgaggccaccagagagtgaggcagagccagggaagcccagaaacccaggcgtcctgcccctagtccctacccccagctgaggctctgcccagccccagtgagccacctgccaagccaggtttagctgcagccaccccctctgtcctcgcagaagccgtgggctgctctattcctgttctgggccagccttattggggacttgagttggggaggcctggcgaggcagcagcagctgcaagctctggttggggatgggggagttgctctgtgaactagcctaggaaattctttccttgtctgcctcccaaaccctccatggctccctattcccacaacatccaaggaaaaggaggcacagcatgaacttgacagcagggccttatctgggttgttctccacagggtttggcccatggcacgtgttatctgagcaccttctatgtgccacgttgtgttctagaaccagagctgtaccagggctcagacagacctggacctgctcagccagggtgtcaggcagggaggaggcacccaccttcgcggaaagctgtgctccccccattcttccagcatcaccccatgatcactccctaaggagaagcagtgaactctaagttaattagcaaagtcatttaaactagttaagcttaattaccattaaatgattacatttaattaattaatttttttacatttgaatttaaaagcccctggggcaggcagggattttctgccacccaagagaccaaggggttgaaggacagatggcacgggccctgcaggccatggcagagaggctgaacttcatattcagggcaaaagtcactggagggctgtgagccggggagagatgtcatctgattgcattaagaacaacagcagcgcaagatcacacctgtttgccctcagagccctactccgtgcctcttcagcccccactgtccccagcccttgggtcagacaaccttgaatttgacactttcaccccaggttgtatgaccttgaagatgtcactgcacctctcagagactcagtttcctcatctgcaaattggggcaggatctggcaggattgcaggtggtttcaacagaaccctgcagcatggaacaggctggcacacagtaggtactccatgaataatgctgtccccctggtccctgcctccactgcctcctcttgggccaaacccaagtttattctgcttcctatagttgccttcaactacaatctgtccccgtggggtccctcaggatgcacatccatggcagagctgggcttgcccttaaaccttgggctaggaggctggaggcatctgtcctgggactctgagatttcacaggctgtgcttgtaagtgggcacagacctgccgtcttggagtcctggagccctgattggagctagggcagagcctggccaggtacccagaccccctcctggggcccacttggtcccttctgtctgtggatgactttcagcgagtcaccacgtccctcacggtttggttgctgtgaagtggagcggaggggtcaaggttgcttgcgtgagtgcaaagccagccagctgaggctggtgttcctcaggagcatccatccagccgagagaggagacttggaagtgtatatcctgcgccatctccaagggatggagctccagttgcacccagcggtagctctgttgatgacatggccttggttggctcttccctgtctcacttctccacttccctatgggtatttcctaggatttacttgagtccaaagcttctcagtgtctgagagtgtactgggagaacccaaggagacagcgcctctgagaatcatggtggggagaacaggacctgatgacgaagtgctcggcaaatgacgcctgatgttacagggatccttgctgacccactggaccacgccctccacaccagcgctggtggttccccacagtctgaggtctacttcccccagcttctctcgcacctttagacttctctgtggcactgctttctcctctcctcaccatctcagctcctccctcctgttagctgtgtggccctgggcaagtcactgcccctctctgattctccacgttctcagtcccgtggcggggacctgacaccctctctgggcaaatgccagcatgctttgctaagcagtcctatcccaggtcttgtggtgtctgccagaaatctccgggaggcagaggatgaaggcctgggcgttagtgtgcctggttggaggtcctggggacgaaggctgctggggtgggggtattgcactcctggttgaaggtcctggggaagtgtttgtggggctgtcactcattcatcttgttaggccaaggtgtgaggaggtgggccgaggtgggtgggggaggttgacgttgtggaaatcactgagggcctggaaagctgctgcgaagagtccgggactcctgggcatagagtaatgttggtgccttgaccagagcctacagacctccttactgggacaagccagctccccgcctgctctgtgctgtgctgctaacccttgcatctcaaacctgcttcagggaagtatgcagcagaaaagcctagccccttgccttaaggcaggacaaactcagaggcataatttgtgctgcagagctcccttgggctcaggccacggcagggatggaaattgaagaaacccttgcttgtcttctccttctttttccctggctccctcgctggtttcagctggaagaaactccctagggaaacatttgcacctgaatcctgctctcaggctcggcttctgggagaacctgacatgagacaacctgctggccctgggcaccacaggcgtgttttaatagaatgagtttattggttagaatgcaggctcggttacttattaaaaaacaaaaccggccgggcgcagtgtttcatgcctgtaatcccagcactttgggaggctgaggtgagcggatcacttgaggtcaggagttcgagaccagcctggccaacatgacgaaaccccgtctctactaaaaaatgcaaaaattagccaagcgtggtggccggcgcctgtaatcccagctactcgggaggctgaggcagggagaactgcttgaacccggaggcggaggttgcagtgagcccagatcgcgccactgcactccagcctgggcgacccagcaagactccgtctcgaaaaacacacaaacaaacaaacaaacaccaaaacccaagttaatgatggtttaaacaaggtagacgattattcgctcctgtagcagtcagtggttcacggtggcgacggcggactgagttctatcccttttctgccctgccgggtgtgggttcatccacttcctcgcgccgctcgcaccccattggcagtattgggtcacatggccagccgtggccgcaaaggacgttgggaaatgtagtcttcataagggagccagtcgctcccgggacagtggggtccacggctgcgggaggggaatagaggtggggactgtcattccctctgcagggagggagcacaaactttaaagcggggacaagattcttttagaaagaatggtcttcgtgtaagaaaatatgcagaggattctgtgtctgtggaaagggagctcttgccggggatgcgggaagatgtttctggaggtgcccggcccagggcgtcctggggcaaggagtggccaggcaggtcctatgaggaccctcctagggaaatccgaccttcttccatcttcagggaaagtggacacaggcagcagcctgggaggggcgtcggaggtggggaaaaggagcgggtgtaaacggagccctccaggcgggcagggacaagtagaaaacgacaaagctaggtcgcgagtgtaacgacacggaacatggcagcagtggggtgagggaccctaggcctcctgggaacttccagggcagtttgagaaagccaggttcccccaggaggggttggggcgtttccattttaaatattagcggggtgtcccgggaggctgataactggcttccgtccatttcccacacgtgtttgcaaaacgaatgtgtcagatgtgcagatgcgcatccctggcgccccagcatagtctgcggccttctgccccgtggttaccgttttccgtggcttccccgagacactccttgccctggacgcagcctctgactccagcttccactccagtaaatagccccgacgtggacaccttgcgcaggcagctttgctggcatttcagatttgagatgatttcctcgggcatgattcccagaagagaagtcgggtaggggaagtgcatttgcctgtaagggccgtggttgatacagccaaatgtctgcctggtccagtggtgccaatgtacccgaccacctgcagagcacaggcaaaaccttcctcggggaagggtgggatagtttggtttcatctctttcccagatttttaaagtactattgaagatactaagcaatttaaaaagtaattttacctataatcccgtctgctagcatgttgatttattccttctagccttttttctaaatataaattttttattgtgtgaaaatttacatacacgagccttttattatgaaaagttaagacatacacagaaacagagagtcacataaggaaccttcaggaagccagcaccagctgcagcagtgatgcccacacacagtcctgtctcatctctaccctcagctacttcccctcccaaattatctaaacattcattccattcatcccagacacagtataatttaattcacaaatatttcagagcatagctctggatgattaggatcttaaaaaatgacaataacagtctttagtatttgcacaagtaacaaccatcccttaatatcagcaaccattcagtctctgttcagatttccaaatgtctcatgaataatagaattaacaaaagaatggtttgatttggtatctgaataagaccccgcgtctccactggctgatggattgccttggtgtctttcatttagtggttgcccctccctgttttcttcctcataatttatttgttgaagaaactgggttgttagattgtagagtttcccgtagtctgtatttccggtaaatcggtagctggtctagtgacttgaccagatcaggttggacttttttttttttttttttggcaagaacacttggtgcagagttctctgctcttctgttgggaggcagtgttctgtcttctctttgtggtattagcagctgctgatgctcagtgcctggactcattaatttattagtggttgcaaataaatttaaaacaaattagtggttgcataacggtgatattctgtcattccttcatgtattcgctgaaatgtttctatagagagaaactgaccctcaacaaaacttctgctatttggctacctggtggtacagtttataaagtgatatatgcttgatctggttcctctaacagttttctaaattaaattgttcttccaacgatgatcaagtagggataaaaaaataagtacaaacttgtgaattcaaagacattttctgtgttttaattgactgcattaattgcccttattgaagttcaaattgtcccatctttcaagctggctcttgagtactttggacatgaccccattggtctttgagaatgtacttgctctctggtttggcaagatgctgcaggtttattgtgtgcatttactgctctagacctggagtcagccatttctcccaggagccctagttccttttagtgagaagtgcctccacaacctttgtcaaaatagcatgtaaaacaaaatataaaaaaaggaaaatagaattaaaaaaaaaacacaacttgggtaccaggggtgcacagtactgctgtggtcagtacttcctcctcctcctcttcctcttcctcttcttcttttttgagacagtctccctctgttgtccaggttggagtgcagtggcacgatctccacttactgcaacctctgcctctcaggttccaacaattctctggcttcaacctcccgagtagctgggattacaggtgtgcagtaccacacctggctaagttttgttttgttagtagagatggagttttaccatgttggcctggctggtcttgaattcctgacctcaagtgatctgcccacctcggcctctcaaagtgttgggattacaggattgagccaccacgcccaacctgtggtcagtatttctacatcattaaatcataatgatacttcctattcaaatttaggaccgcagggctttcacttaacttctgtcatttatttgtattcattttctctaggaaagaatctggttctcaatgacacacattaatacagtaagaaaaccatttgcatgaagccaccgtacacacacaatgatatcagaataataccagcaccatcgtcagcataatgcaatgattgaaacagtttaaaatgattttttctttttgtctttagggcatattgcactagaaatgtatagtcaaattatggtattttaaagttccttggaatacttcctctcaatgtggttgtaaaatgtgtatacacaggccgggcacggtggctcacacctgtaatcccagcactttgggaggctgaggcagacggatcatgaggtcaggagttcgagaccaacttggccaatatggtgacaccccgtctctaccaaaaatacaaaaattagccggcgtggtagctcgtgcctgtagtcccagctattcaggagactgaggcagaagaattgcttgaacctaggaggtggaggttgcagtgagctgagatggtgccactgtactccagcctgggtgacagagcaagactctgtctcaaaaaaaaaaaaatgtatacagaggttcatttgttcccttttgctttcaatgtttaggggatttgtaaaacttttataattatatgacatacttacatgtttctaaaatcagatctacagaatgaattatattcagagaagcctaacttctattcctttctgccccaccttgtccccactcttccccatatgtaaccattatacgcaatatacagtttatccttcatggcatttgtaaaacatggccacaaatccttggatagtcatcccattaagagatgtggtctatgtccctctgcttgcatctggaggatttgtgactgctttagctaacagtgtggcagaaatgatgctcagagacttctgaggtgggttgtaaaatgccttagagcctccacccagctcacctggggcattcatgcttggagccccctgagccatcacgtgaagaagtccagtcactccaagacccctttttggagaggccgcgtgtaggcacctgggtccatccgctgagcccagccttccagatgtcccaccaaacactgctgtgtgagtgaagccatcatggagcctccagatcagcccatcttccaaccggctgtcagtgagtgatctccatcaacgccgcatgggaaagaaaaaccacccagccagccctgcctgaactcctgacccaaataatcatttatgcaataaaatgattgttcagacccaccaaaaaggtagtttgttatgctgcttcaggtaattagaacacccttccttttccatttttaatataagctggttcatatatgtgtgtatcctgtctctgtattagataaatggtagcatattagagtcacttccctacctcacacttttcactagacaatatgttctggccatcactccagagagattttattttatcttattttatttattctttatctgagacaaggtcttactctgtcacccaggctggagtatagtagtgtgatcatagcttactgcagcctcaaccccctgggctcaaacaatccctcctgagcctcctgagtagctgggaccacaggtgtgcaccattgcactgggctaattttttttttttatatagcgctttcctatgttgcccaggctgttctcaaactcctgggctcaagcaatcctcctgccttggccccccaaagcgttgggattacaggtgtgagcctccatctcagcctccagagaaattttaaaggacaggtttgaattttgttttgttagccaatatagaaatcttttttctgctaataggtgaattaagaccatataatcagtatgtttaacctcagttctgtcatattgttttatgttacatttatacttacgtaaatcttttaaacaaattgtttttcagtgtggcttttatttttctctatctcttattgtttttttttttggtactaaggaagggtcatatttttgctgaaatgattacctttatactaatatctgcacataatgctttcagttccctcttttttgtctgttggtttcctactatgaacaatattgaaatgtgctagtatcctcttccctttcctttcccacagcacctgatttgaattaatatccttttactcctagttattaactataaggcagtcaacaagcttattctacttttcatatgctcttcccattttccctcaaatatctcataattgtactgtaacagctgtactttattccttacaaccattgtttactcctaatcgtacaagtaagtatatgctgtatatgttgaatacgcaccatcagaccttatgtttatgtttctctagtcactttggttgcctgacgcttgttttctaatagggtcctcagtaggtgctcccaggaataatactcttggagttcttgcatgttggtaattgtttatgacccttatacttgaacatcagtttggctggagacatatctttcttggattgtactttacccctttaataatgtggccatactagtcccttgtcttctggcatgaagtattgatgtaggtaagtctgatgacagtctgattttcctgataagtgacttaatctttttctttctcttttttccttttgtcatgccgtcttgtctaagagtgacttgatcttttcccagattctcaatggcatccatagaatatgtcatagaatatgattctctgttggatgtgccgggtcactttttttttaggtacacaatgttgtttcaagtttttatctatctcaggaaagtgtttttaaattgtagtgtttactctttctttgattatctagctttggttttctttttcagcagctactattatacatatgttagatcatttgcctgtcatctacatagtcactttctctcaatcctagttctctgtcttccatttttttgttttagaaatgttcatcattttatcttctttgtgttcatttggtcttgtgttccttctagtttagtcgtcattctgaaatagggtttttcttttatttctaattatttcttcagttctagcacatctttcctgaagtcttccaaattttgttattcttttataacttttgttactttcttaacttctgttggctcatttttaaatgagtttctacactttggggcatgtattttggggcatgtgtttctggaatgccttcattatctgtgggggcatcattcatcattctcatttttcttacaataattttgtatggggtttaaccacaatcattttgtgttgctcattttttaatgaaatgagttttctaaactctgaagaagagggtgggtcagagccacttttctaacttcacggctctatagtttcctcttctgttgcttttgtgaagtgttaaaaaataggatcttgtactttattttataccccttttccttcctacctaaaccttttctcccttcttccctccctccctctcttgctctttctttctttcatttctagtttttggttcttgttgtctctgttctgcccattttagattctactctcagcctgttctttttttttttttttttttttttgacagtgtctcactctgtcgcccaggcttgaatgcagtggcatgatcacagctcactgcagccttgacctcctgggctcaagtgatcctcctgcatcagcctcccaaatagctgggattacaggtgtgtgccaccatgcccagttaatttttgtgttttctgtagagacaaggttttgccatgctggtctcgaactcctgagctcaagcaatctggccaccttggcctcccaaagttctggtattacaggcgtgagccaccataccctgcctactcttagccagttctcagtgtggaccctgccctggaagggagttctaatttattagcactattccggcccctctgacctttctatgaaccccttgtaatcaccatgagtggggcgtgtagcaagacctcccagtctcagcaatgactgtcacttccagttggaagcaattaagacctggtgtgcctcctccctctttttcttttactgctgtggtgatctccaaagacacagtggcatctaaggtagagggagccttgatcctccatcatccctataaggcacacagaacagactggaggcaactagatcagaatcctactagatgtttaaagggaatgtgattccagggaaatcccatgcctggcttacaaaagcctttgatgacttgaaacttaaaaagggattaaatgacattaggacctttggccttctaggagagaggcagtggactgagaaagtgggaaatctcacccagatagggataagaagaaaaaggaaacaggcagaaagagaacaacccaaaaggcagaatgaagggccctggaggacactggacaagggagtttctcccctgagaagcatcagggcctgatgaaaggcccatcctcatcctcaaggtaggggctgcccacagactgaccggtgggctctcaaagtcactatgaatctttacatgtctgcacaggctctaggtgggaaggatgcccgtggtatccaccggagtatactggggggtgtggagaagggtaagtaacttgtcattttagttgagaaggccctggacaagaggaccctcacagacatagacctgcacatcaccctgagctggaggcagtgctgggtgggacaggtttctttcccttagggaagaggggtgtgttctctgtataggaaaaatggagcaagagttatctggtgactgtaaggaaatattacagcagagacaaccagcactcgctacatatccatggtctccttcctttcccagcctccctgcctgttgagttgaggccacgtgactcatcctggcagatggcggatgcagcggggacctgcaccaaccgcagtggagacagttaagagttggggccttctcacatcctcctctcttgttggcagtaactgtggaagtcatattgagaggatggaaccgcaggatggatgctgcttggatgccagtgtcactgtgtggagcagagctgccttagacattatccaatttatcttagactgggacatgatgaggaaatgaaccttagtttgcttaagccatcaagattgaggggttttgttaccacagcttgtcttaatctgtcctaacacaggtgtatacttcttttttacacaaaattgagaccgaaccaatcatgttattttatttattttattttatttttgagatgaagtctcactcttgtcccccaggctggagtgcagtggcgccatcttggctcactgcaacctccgcctcccgggttcaagcgattcttctgcttcagcctccccagtagctgggattacaggcgcctgccaccatgtctggctaatttttgtatttttagtagagacggggtttcaccatgttggccagcctggtctcgaactcctgacctcaggtgatccacctgccttggcctcccaaagtgctgggattacaggtgtgagccactgtgcccggcccaaccatgttattttataacatgctttaaaaaactgttaaagaatcagcttaattgaggcataatttatagactttaaaattcaccaactagaagtgtcagtttgataaatggagacagctgtgtaacccctgcctaggccccttccttcacaacccagagacctcacctgcacatttgcggttgacttccattcccaccccacccctcccaccccctcactaaacatggatttgttttctgccactagagttttaccttttccagaatgccgtataaatggaacataatgcttttgagattgagccaaaagtccattcctttttattgctgagtcgtatttcatggtatggatgtgccatggtttgtttattgcccattcagcagttgagggacgcttgggttgtttccagttttgggctattgtggattaagacgctatgaacatttgtgtacaggttttgtgtgatcacatgttttcatttctcttgggtaaatagctgagaatagaatttctgggttctgtgataaatgtagattcgactttaggaaaggctgccaaaatgttttccagagtggctgtaccatgttttattctaatcagcaatctatcggagtactaccttcttcttcaggaagctacgataacatcattattttgcaacttaaggaaagactttttttttccttttttttcttttttctttgagatggagtctcgctctgtcacccaggctggagtgcagtggcgcaatctcggctcactgcaacctccgcctcctgggttcagccattctcctgcctcagcctctccagtagctgggactacaggcgcccgccaccacgcccggctaattttttgtatttttagtagagacggggtttcaccgtgttagccgggatggtctcaatctcctgaccttgtgatccaccctccttggcctcccaaaatgctgggattataggcgtgagccgctgctccaggccagaaagattttttttggaaaatgatttcaatagtttggatagtttaaaccatgccgtattgtttcacatttaggtcacttccattttgctccctggtttgaggtgtgactgtgaagggcatcttgtaaaggaattttagtgcacatctcgggctatttcctgaagcaaaattcctaaaaatgcggttaaagggtgaacttttctttcaccttttgatatacaatgccctcttaaactgttgaaccaacttccattagaaccagagtgaggggcttgtcacccctttcctgtctgatttggaaagggcctcgtcatgtagtaaggatattcatctttccagggccttattttcacagtttttgttttgcccatcctactctgcttcaggagttttttaatccacaggctttttaagctattttgtcatcaaacgtgtcagtctattcttttcggcttgtctttggtgatatgcttggacagggcttcctcatctgaagagcatgaaaacagtcacttaaactgctttattttatttatttatttatttatttatttatttatttatttatttatttattttgagatggggtctcactctgtcgcccaggctggggtgcagtggcgcgatgtcggctcactgcaagctctgcctcccgggttcacgccattctcctgcctcagcctgtgaagttgctgggactacaggcacccgccaccgcacccagctaattttttgtatttttagtagaggcggggtttcaccgtgttagtcaggatggtctcgatctcctgacctcgtgatccacccgcctcggcctcccaaagtgctgggattacaggcataagccaccgcgcctggcctaaactgctttatttttttttaagactttgaactttacatttggcactgtatgtatttatttgtaactgttaagtgtatgagacacgccaaagagaacatggcacacatgcaagtttaacagataataataaaaatgctcaccccaagatacccaggcagaagaggaagccacagaagagatttagtgttttctctgttacatttatgtagaggttaaaaccaagtaaaattgaactgtatattgtttaagaatacaccttcagaactgtaaaaagcaagggagtttttttgagaggagagggagatgaagctgggtggggacactcggggcctccacgggactggaatgctgtttcttcaggcgggtggtgggcctattggagtcattctggtctaaactgtatcccgtcattttacaaactctttgaatatgtatctttctctgtgggtatagaaaaacccaaaccaaagtgctttttctatcctatcactcaacaatcaacacagaacactgaccaaatgtagggggattgttccccaccagcaagcaagcacttctgcagcagacaccagctgggttctgacaccatcgatctgaagacaacatcggaccacaggctgaggaggggacagagcagagacccctccctcttaaggggacaccagcactgccaccctaccccacacaaggagataaaggaaaatcttgagtcctttcaggggaacttccaggtacccagctaggcctgagaagtaaatgagcagcttgataagcaagaaggtaatagtaacataaaacaatagccaaggaagttagagtcagatgtttggttccctatagaaactgaagataagatcttcacgtatgtccctgagttgtttttcagcaccacactctaaccaactgagctaaccggccaccgaccctgagcttttcaaaaacctggacccccaccacatggagtctgctggcacatagactccagagaacggggagctgagcactgaactctgacctcttgctgttctttgatctacatttcttcctgaggggcctgaaagaagccacatccacaggccagaccttaacattcctttctgctgaccccaagtttttagacaaagtctagattccttaatcaatggcaaatcagagagtctttgaatctacctatgacccagaagtgcacccacttcaagacatcccacgtttttaggccaaaccaatgtgtagcccctgtatattgatttatgattgtacttgtaacttctgctttcctgaaatgtacccctgtctttaagaagccttgtttgtaagccactggggaggttgggtctcaagtatgagctgtccccattctccttgcttggtgccctgcaaataagtgccctctcttctcctgctgcaaaacctcagtgtggatgtttggctttactgcacttggcaagcagaccccagtccagtgtggtagcaagggctcaatccccaagactgctccccaacttccaatgtcaatcaaaagccccaggttgtttcacctctgcttctggccaactagcttgaaattggggttcccatggccacatccttgggtttaacttgctagagtggctcacggaacttagggagacacttacttatatttactggtttatcacaagagatacgtcaaaggagacagctgaagggatgcatagggtaagttatggggaaggggtgtggaacttccatgccctccctgggaagcaccgccctctaggaaccttcatgtgttcagctccctgaatctgtccctttatgttgttacggaggcttcattatggagatacgattgattgtaatatgatatgattgcaatgtcactggtgatcaacttaaccgtcagttctctctcctcttcccaggactgatcctgccttggtctttcctctgaccagccctatcctgaagctacttaggggctgccagccctcagtgaatcattcacatgcaagaagacatcactttggagattccaaggatttcaggagttgtatgccaggaaaagggaagaagaccaaacgtatatttaacaatatcacagttccacatagcatttaagcaaatttttaattgtggtaagattcacataatataaaatctaccatcttaaccatttttaagtgcacagttcagcggcattaagcgcgttcacattgttgtgcatgcagtcatcaccaccatccatctccagaattcttttcatcttgcaaaactgaaactctgtcctcattaaacaacttctcatctctcccccatccccgggcaaccaccattctactctctgtctctctgaatttgacaagttgaggacctcatataagtggagtcatgtttgtcctttcatgccttagcgtaatgtcctcaagattcaccatgtggcagcacgtatcagagtgttcttcctttttaaggctgaatcttattccaccgtgggtatcaaccacatcttattcattcatctgtcaatgggctttgcatagaattaaaattttcccccttgcatctccatttgactcctcaattgtccaggaaggtacatgggtgtgtggtgtgaggtctgggcaggtggtctgctttgatttccccacttctgagagccatgagaaacttgctccatttcacaagcttttgtataaaccctatcgtacagggcatggtgaggaggctgaaataaagctattcttttattcaccaaatatcagttgagcccctgttacttggtgtgcatgtttctaagggcctggggcactctccatgaagacaggtgtaaaccctgccctcactggtgctgcgggttggaagacagagaccaattctaaggcagaggagggagtgatcgcttccagatttgtgggagatgttcaaggaaggcttcctgggggaggcagcctttgatctgggccctaacacatggatagactgaacagaaatgagaaggggagaatttcactaagagggaaaagttcacctaaaggcctaagagccaaatgtgggtattggtttgtagttttatcagagagtattcagcagcaggtgacagaattcctcaactacagtggcttagtaataaagtcattggattcatagaaagaaaactgcagaggcagttagttccatagcttggtggagctccaggttccttccatcctgtgtgtgttggtttttgttcttaggctttttgcctcatagttgcaagatggctgcctcatctccagtcattgcatcatctcacagctttcaaaggctggaggcaagggggtcagccaatgtgttaagagtctgctcctctcacgtctatctctttataccaggaggtccatctctcccagccttcccttatgtttcatcgttgttcagaagtacatcaggaggcagccacagaccccccacttgccatggggagtgggattccctgactggtttggcccagtcaggattcatcctccagagctgagctgtgcaacagagctctctgtgttgatgggaatgttccagatctgtgctgtccaaatgacagccaccagccacaggtggccattgagcacccagaatgtgactcatttgatggaggagtggaattcttactaaaggtcattttcatttgtttaagtgtgaatgtgtggtgagaggctgctgcagaggacagcccagttctggaggttgcgccactgacccctcgctggatgaggtctggcttctgttaatggggagaagggagatgtcagttgaggaggtgacaaaggcatctgcccagggcagcacctgcaagtagataaggaaccagtgtgtgtgtgtgtgtgtgtgtgtgtgtgtgtgtgtgtgtgtgtgtgtgtggagggggagaggcattagaggaggcctgggtgaccgcagcacctccactttcttcaccgggagggggaatgggagagaactcacccatgcacccaccagcacgcgggctcttcagtcccaccctgagggcttcagaaagctcggtgccctctctggggtctcctgggcccctctggctctgattttgtctccgcatccgggcccctctttaggtcttcccagctgaggaggaggaactgacacgacagcaaattccaaagtccgttcttcctctcctgaatcacactcggcctggccagctccctgctggccacagggtcagggctggaggagcctcttgtaggcctggtgtctgggaaatgctcccatgagcctgcagggaggggcgggtcagcccctttcataggccaggaaggtgagctggtccctctggccgggaggtggcctcggccagcctggcacgcccagcctccggaatctgagctggaggcagccacaggccctaggccgtaactcagggccaagtcaatggaaacatggtttgggtgtatttttaaccttgctggctgtgagctaagaggctggctctggcatctgtgtggtcagtgaagatgaatggctgggctgctgggcagcagtgttcagcatcccggttgagcaggcctcttgcccaccatcccccttgtcactgatggttcatatgggagggggagaggggcaatgggcaggaagccagtacccctcctgccaatgcccctcctgtctctccctccagcacctgggctgtggagagagggttcagttcgaaccctggctctgcctcttaccagctgtgtaaccttgggccagttactttacttctctgtgcctcagtttcctcacctacaaaatgggcatcctagcactgtctcctggggccagtgtgagcccagcatctgctcatggcaaatactcaaaaacaatgaccaacattggcacagccagctccggtccaccaactttctataccaacccacaatgagctccacaattattgcctaagcagctaccatcaccttcaccttgtggttgggaaaccaaggcacagagaggaaagtaaccagtgcgaggctcacaagtggggctagcagggagcacagatctgagcccaggagccctcttccagcaaggctggcctctggcgccacggctgggtcattggcttctgtgttcctgggatgctgggtcccactgcctgtgggggcctcaggcccctcgtcgcttatctactgatctctgcctccactcctgcttgtgagcctcaggatggtgagtgagtgagttcgcttgttcggctgtttattcatttactcacgcactcatcccacccgtgtccacagagccccttggtgggcggactctgctctgtagatgccaccgtgcccacagcccgccctcaccaaactcagtctggtggagccaacagacatcaaagaaacaagcagccacaatgacagtcaaggggcactcgtggagagaaatggggagctttcagtcttgggctgagtggtttgggaagccttgcagaggaggtgggttttttctggaactaggggacagacagtgggggcaacaaagcaatttacttggaggggccttgaggctgcatatgagttggacctggtctagcaaggaaagagggaatggtgcaccaggcagaaagaatagcagttgcagaggcatgagtggaaaatgccgagcctggtgtggctggggctgcagggtgcacaggggaagccaaactagctccgacctcccctctgctccctcccctctgccaccatccagggcacagctggcttcctgggcaaaggagaagcctccctccctgtggctccgtctcggggaagaggctgatgctggctggcccttttacactttctggtgggggccaggctgccagctggatcaacgaacagccagtgcaaaaatgtcaggagcaattagaaggtacccgtggtctgagctttatctgcaacaatacgtctttattaatgaggcttttaatgatgcaaccaagagtgctggcagaaacggtcacagctacccatcctctggggttgcgcttttttttttttgagacggagtctccctctgttgcccaggctggagtgcagtggcgcaatctcggctcactgcaacccccgcctcccatgttcaagtgattctcctgcctcagcctcctgagtagctgggattacaggcatgcgccaccacaccaagctaatatttttgtatttttagtagagacgggttttcaccatgttggccaggctggtctcaaactcctgacttcaggtgatccacccacatcggcctcccaaagtgctggggttacaggcgtgagccactgtgcccggcctgggcacgtacttttttgtgtgtgtgtgtgtggggtgggggcaatgtcttgctctgttaccaggctggagtgcagtagcatgatctcggcttactgccacctccggctcccggattcaagccattctcctccctcagccacccgagtagctgggattataggcacccatcaccacgcccagctaatttttgtattttcagtagagatggggtttcaccatgttggccaggatggtcttgaacttctgacctcgtgatccgcccgcctcagcctcccaaagtgctgggattacaggcgtgagccactgcgcccagctgggtgtgtacttttaattcactgctgcagcccctgatggagatgaggccttgagttctgcccccttgaaagctcaatctcctccctgtgaaatggggttatggtgtgtatcagttaggtattgtgccataacaaacagctcctaaactcaggggtagaaaacaacaacaattttaattagctcacggttgtttgttgggctcagctgctctcagccacttggtcactgtctgtggcctcagctgggacatgtgggcctggtgatttaggggccctctcactccccagtgggctagtcctggctgggtcataggtggcagaggagtccccagcacaagagtggaaggggcaaggccccttgacacctagtctcagaactggcacagcattgctctgccttctactggcatggcaatcacatgacttgagggaggggagacagagtcctttcttcgtggaagttgctgcaaataatttgcagccgtatttgcaatttagatgtagtgaaatcaatcttgagttatatcaataacgttttctgagcaccgccccttcccctggctctgatatgcaggccttatgctgggtagtgctgggaccacagggagaaatctgacttggtgtctccttcccaggagctctgatggaggacacagacacagtcagacaggagcacatacaaggtgctagaagccaatggaaagtttggcttaacagacaaaagggttggccgggcgcagtggctcatgcctgtaatcccagcactttgggaggccaaaatgggcagatcacctgaggtcaggaggtccagaccagcctggccaagatggtgaaacactgtctttactaaaaatacaaaaattagccgggtgtggtggtggctgcctgtaatcccagctacttaagaggctgaggcaggagaatcgctgaacacagaaggcagagattgcagtgagccaagatcgcgccactgcactccagcctgggcgacaagagtgagactccatctccaaaaaaaaaaagaggtcatgggggtcacggggtggtatgtatgtggggaataaactctaaaggggttgtgaagtgtcctgtggctgcaggggactggagctacccttgattctgcactgattctttcccagtggtgttcatgatggtcttgtcagctttgtgttgtttgctaaggctcagagttggtgaggttatgcagcctaacaagctctcagattgggatccaagtatacctggcctttggcatctgtcttgagccaactggctttgaccctgatggactcagtaagtgagacactcccaagtgagccaatgaggctcaggccccaacacggaggtgtgtgtgtgcaggtgagcttggggaggcaggtggctgaggcttgggcacagaggctggaccagacacaaatgcctaaagggtttccaggggatacattctgggatccagagtcaggacctactttgtgggaaccacttgttccctagcccctgttctgccctggctttgccgcccagggctcacgacctttctttcccttctgatgtgtttgtcgcatgtcagtcttgctgggaagaaaacaaaggagatgcagccttcagcttttccttgtcacctggagaggaagcctccaatgtcttccagggtggggcctgccccagaggaagccacagacactgtgggtgtcttctggatggcaggagtgacaatggcagcagcagcagtcacagggacagcaacgtttgccaggcactgtcctggccttgcctctttgaatcctcatcatgtccccaaataggtgttattaagcctgtttcacagatgaggaaatcaaggcatggaaaggtgaagtggattgcccagatcacacaatgagtaaagatgcagccctgggaatgtccgatgccagcagccctgctgtcttcagcaagttggcagcctcaggagccagtgggtaccaggctcaggagcccagtgggtaccaggctaactgctttgtctatgtcatggccctgaatctccacaaccaccccacctacggctgctatcacctaaggtcttggagatggggaaactagggcacagagaggcaaagcaacctgcccaaggtcacacagcaggtaggcagcagagccaggaatgggtcacagcagttgggactctgaagagtcctcgttcttagctgctgggctgggaaccctctgggctccaggccctgccgggagagcggggctgtaagaggccagtgtgggcatctttgggatggtccctgtgagaaagttcactctctgaatctttgcttccttgtggtctcttctgatgtggccagagggaagagcagagacgccatggaggtaggctcggcaggtggaaggctgtggggaggaacagagggaggctgaccgggatgcagctctctccactctgggaggccttgagctcctgcagctgccttgggctctgggcacaggccacctcctgggcctctctgggaacctggatgtttggacacccccatcctctggtcaggggtcttagggagtactcactttacagcagcaacagcaatagcaataataacagcgtggctgccacttcctgagcacttactaagtgccaggcactgccctaggagcttactcctgggaggcaggggccgttcccatttccattttacaggggagaaaacagaagcacagagagggtgaaagactcactttctaggccagcaagtagaagggccagggattagactctatgcacctggacccttcactgctagggaaaccaaggccagagagaggaaagggcccaccctgatgccccagcactggaatagaagagccaggatcagaaatgccaggtgccaccgaggacagaggaatgaaggtggggtcccacgtcccgtgcatgttcccttagctccctgggcctctgtttctctgtctgtaaagtagagatgctaacggcacctgccccagataatgggtttgaagattaattgttaatgcacacaaagcacttaggagacagcctgcatgcagtaggtgcctggtgcagccgctgtcaccactctgctggggccctggggctgtagtgctggcactgggtctctggcgaggcagtgggcagctgggacatccccacagtttacaagagatagccttgaggtaggacccgctcacccaagtccggcagagaggacagccaggcttacatgactgactgctcggcgtctacccacacaccaacctggtgtcccctcactgagctccctggcctggttgctcattgcgtgggcctcagccaaggctggccagcctggcaggatgaggcatgtggctcgaacccttggggatgcccccttggtggcagggagggcctgcccagaagggactctctgtttatgggtgtcactggccaagaagctggcagtgctgacaaatctcgtgtggtcctcatgctgtgcagggcttgttctcaatgctttatgcctaactgacagggcagggaacagcagcagcccattctgcagatggcaaaactgagctgagaggcaaagttccacagctggtgagccacagggacccagaggctgcaccttgaccaccacctagtaagtggggtactttcattattatgagttaattactggggaaacaggcacagagaggtgaagtgtcttgcccagggctgctcagatgggaaggggtagagctggggttggaagccaggttccccagccagaggctgcagaggtccccttgccaccctcagcgtagccatgcccccagacccccctgtggccctgcctgtcggctcacctggtccttcagcattcaccccaggcccaggctgctgtgtgcagtctctgatgggacaatgatcttcccaggcctcagggtgcccatctaagaaatggccttgaagccccagtcttggggaatgggggtctgcaggtggcccacgtgctgcctgggctccctgatgccctcctgtctcagctgcatccttctgggcctgatcttggaagcataacggggctgccagggccctgcgggaggccccttgcagcctcacctgccgcctctggaaatgcacgcagccctgtgggagtgggaggccctgcccaccctctgcgtcctcgcctcgccctgctgtcctcccgagctgagttagggattcggggtgcattctgccctccctctccctcctcgggcccttttcctccctttgaactgtctgtctgtctcgctgccgaggaggaagctattcatagccaaggtgatgcaaaattcatcaagtgtggctgctggggctgaggctgcccctgtgcgtggccagcgcaccccgaccactcagcactcttcctcagcaggtgcgagtgagtgtgtgactctttgtgagaatgtgagtgtgtgtaagtgtgtaactgtgattgtgtaactatgagtatgtgtgactctgtgtgtgattctgtgtctctgtgtgagtgtgtgactctcagtgtgtgtgagtgagtttgtgagtgtgcgagcgagtgtgggggcacctcctcggtcctctcccgagctgcctctctcctggcctctcctctgggtctccactccggacaccgagctcagcacagcttcttaggagggagcagagctggtggcattagcccatgtactcttcacgttctggccaattctgggcagggcttctttctccccttacctggataacagtttgttgttctaattctcaacagtgagaattagacacaacagtggtcatacctctggagcccacaccatgagccaggcgttgttctcacagactcattccatcttcacaataccctacggggtagtggcgattactacctgaattttacaggtgggtaaactgaggcacggaaaggctggctagggcagctggggcctgagggtggagggctgggaggtggaagagctgggatttgaacccctgtctgtcagcttaatcaccactgcttacccaatgcaccattctgcctccctctccattggtcctgtgggtagatccatagattgattgattgattgtcttccccagagactccaggtgcagaaagattctggtgctggaagcttcctagaggactggtctctatccccttcccagaggtaggtgaggaccagggaggagacatgaactagccagggagggagggccgaccccacctgactccccactctggctctgctcttggccactgctggggctgtggccacaggcatggcctgggttggcccggcacctcccctggcagggcagccagcctgagccgcatgggccgccctgcagaagcatggtctggggatggtaatgaacacagcaaatgtttcacttgctctgcttctgggcccccgtgctcagcgctcctccctcacagcagccccgggggcatgggtgtccttttcctccccagcaggtccggatccagagccctgcctctcagccttgtctctgcgtgggctgctgtttctcctgtgtccctggttggggattcccccgtttttattgaggtaaaattcatgtaaggtaaaatggcccttcttttttttttttttttttttttgagacagagtcttgctctgttgcacaagctggagtgcagtggcgcagtctcagctgtctgcaacctctgcctcctgggctcaagcgattctcctgcctcagcctcccgagtagctgggattacaggcaagctccaccacccccggctaatttttgtatttttagtagagacagggtttcaccatgttgcccaggctagtcttgaactcctgacctcaggtgatccacctgccttggcctcccaaagtgctgggattacaggcgtgagccaccgcgcccagccagaaattgcacttcttaaagtgtacaaattaagtggcattctgctcacgatgttttgccgtcatcacaactctctagttccaaaacgtttccatggctccaaaagaagatcccgtgaaaatgcggcacactcactccccgtgtgccctcccccgagcccctggaagcctctgagctgctttctgtctgtatgggtttgccagttctgggcatttcatatgaatggaaccctaagcatttgtccttctgtgccctcaaagtctgtgcatgttgtaccagtgccggaatgccaccctcttcatgtcatggatgaaagacattccattgtgtggacacacttggtgtgttcattcatctgtgggtggactcagggctgtttccacctcttggctactgtgaacagcattgttatcagcattcatgtacaagctttgtctgaacacctgttttgatgcttttgggtagaggcccagaagcggaatggctgagttgctgtccctggtgtttaatggtttgttttcttgctgtccaaggccttaacaacagtcctcatggtctcatcctgtctgtgtcttccctctgggctccctacctgcccatcggtccaatccaaggctgctttttactcctccctccctaaaaaccaggagctccagccagggacccaggaccccaagggacaggctccagatgaggaaatcaaggttctcaggggaaaagggtttcaccccacaagttggagtggagctgggatttaaccttaggccccctccccccaccccggacccctaggtcctggttctttgtgctgtagctgcatgtcccacatggggatatcactcccagagagagctggccacattcccagcatcttatctgttgggcgttggctttcctggaagatccagggcaggacgtgaggctcttgtatgaaaacaagcctcaagtggactctgcagcagaatgccagccttgcatacacttccagactcagtgaacggcatccaagaaatgtcatggcttgaatgggcagggaccccctgggactcccttggcccagccctcggcctcagctgctccatgacttagaagcggggaagctttgagatggcctcctcagggtgcgctggggaggtctctttgccatgttcagaactcgccctggcctggactcccctggagctcccttgagcttctctgaacccctaggtgacaggggaagaaaccctcagatgggtgatcacggcccttcccgccccctggtcccaggcattgatggggctgtggcatttgcttttccttcctccaggggtcctggctccactcagcttcccactcctcctgccccctccagagcagctgcgtccctgcgatcaatatggagctgatcaatctatctgtccctctgcttggctgaggaagccagcaatgatggccaccttgggaccccatgagtgctcctgagactgtggcatgtatcacctcctcactgcacaggtggggaaattgaggcctccagagggtcagggcttcccaaagttcccagcaagtctgtggggtgggaagggctggaacctgctcagctggcttctctttcagacatcacgtctgtgatgcatatggtcctgggtgccctgtgtccccgtggccatgcctcaggggtcctgaagtgctaaaccatgaattcatcaaatgttgactgagtgtctgctctgggttgggcaggccctgtgcatccagggatgcctaagacaaggaccctgccctcacgacggagctgatgttctcatcgggagcgggacaacactgagatgtcaggtggtagtgagcacaataaaccagcgaaatgggaaggaaaaggtcagggaagacctcctggaggagacatttgagcagatgcctgaagacagtgcgggatgagtcacaagatgccagcaggaagagctttccaggcagggagcagcagtgcaaatgccctgtggttggcatgtgcttggcacttgagaaagttgcttcagagctggcagagctcacaggcctggcccctactgtaggcactcagcctggcctccatggattcattccacatactttaaacattccaactaggggccagcatttt
